(19) United States
(12) Patent Application Publication
(10) Pub. No.: US 2009/0098103 A1
(43) Pub. Date: Apr. 16, 2009

(54) Modified factor VII polypeptides and uses thereof

(76) Inventors: Edwin L. Madison, San Francisco, CA (US); Christopher Thanos, San Francisco, CA (US); Sandra Waugh Ruggles, Sunnyvale, CA (US); Shaun Coughlin, Tiburon, CA (US)

Correspondence Address: Bell, Boyd & Lloyd LLP, 3580 Carmel Mountain Road, Suite 200, San Diego, CA, 92130, US

(21) Appl. No.: 12/082,662

(22) Filed: Apr. 11, 2008

Related U.S. Application Data
(60) Provisional application No. 60/923,512, filed on Apr. 13, 2007.

(51) Int. Cl. A61K 38/48; C12N 9/50; C12N 15/11; C12N 15/00; C12N 5/06; C12N 1/19

(52) U.S. Cl. 424/94.64; 435/219; 536/23.2; 435/320.1; 435/325; 435/254.2; 435/254.23; 435/358; 435/352

(57) ABSTRACT

Modified factor VII polypeptides and uses thereof are provided. Such modified FVII polypeptides include Factor VIIa and other forms of Factor VII. Among modified FVII polypeptides provided are those that have altered activities, typically altered procoagulant activity, including increased procoagulant activities. Hence, such modified polypeptides are therapeutics.

### RELATED APPLICATIONS

[0001] Benefit of priority is claimed to U.S. Provisional Application Ser. No. 60/923,512, to Edwin Madison, Christopher Thanos, Sandra Waugh Ruggles and Shaun Coughlin, entitled “MODIFIED FACTOR VII POLYPEPTIDES AND USES THEREOF,” filed Apr. 13, 2007.

[0002] This application is related to corresponding International Application No. [Attorney Docket No. 119357-00067/4913PC] to Edwin Madison, Christopher Thanos, Sandra Waugh Ruggles and Shaun Coughlin, entitled “MODIFIED FACTOR VII POLYPEPTIDES AND USES THEREOF,” which also claims priority to U.S. Provisional Application Ser. No. 60/923,512.

[0003] The subject matter of each of the above-referenced applications is incorporated by reference in its entirety.

### INCORPORATION BY REFERENCE OF SEQUENCE LISTING PROVIDED ON COMPACT DISCS

[0004] An electronic version on compact disc (CD-R) of the Sequence Listing is filed herewith in duplicate (labeled Copy # 1 and Copy # 2), the contents of which are incorporated by reference in their entirety. The computer-readable file on each of the aforementioned compact discs, created on Apr. 11, 2008, is identical, 662 kilobytes in size, and titled 4913SEQ.001.txt.

### INCORPORATION BY REFERENCE OF TABLE 6 PROVIDED ON COMPACT DISCS

[0005] An electronic version on compact disc (CD-R) of Table 6 is filed herewith in duplicate (labeled Copy # 1 and Copy # 2), the contents of which are incorporated by reference in their entirety. The computer-readable file on each of the aforementioned compact discs, created on Apr. 11, 2008, is identical, 1977 kilobytes in size, and titled 4913table6.000.4-11-08.txt.

### FIELD OF THE INVENTION

[0006] Modified therapeutic proteins are provided. In particular modified Factor VII polypeptides, which includes Factor VIIa and other forms of Factor VII, and uses thereof are provided.

### BACKGROUND

[0007] Hemostasis is the complex physiological process that leads to the cessation of bleeding. Platelets, plasma proteins, and blood vessels and endothelial cells are the three components of this process that each play an important role in the events that immediately follow tissue injury and which, under normal circumstances, results in the rapid formation of a clot. Central to this is the coagulation cascade, a series of proteolytic events in which certain plasma proteins (or coagulation factors) are sequentially activated in a “cascade” by another previously activated coagulation factor, leading to the rapid generation of thrombin. The large quantities of thrombin produced in this cascade then function to cleave fibrinogen into the fibrin peptides that are required for clot formation.

[0008] The coagulation factors circulate as inactive single-chain zymogens, and are activated by cleavage at one or more positions to generate a two-chain activated form of the protein. Factor VII (FVII), a vitamin K-dependent plasma protein that, initially circulates in the blood as a zymogen. The FVII zymogen is activated by proteolytic cleavage at a single site, Arg¹⁵²-Ile¹⁵³, resulting is a two-chain protease linked by a single disulphide bond (FVIIa). FVIIa binds its cofactor, tissue factor (TF), to form a complex in which FVIIa can efficiently activate factor X (FX) to FXa, thereby initiating the series of events that result in fibrin formation and hemostasis.

[0009] While normal hemostasis is achieved in most cases, defects in the process can lead to bleeding disorders in which the time taken for clot formation is prolonged. Such disorders can be congenital or acquired. For example, hemophilia A and B are inherited diseases characterized by deficiencies in factor VIII (FVIII) and factor IX (FIX), respectively. Replacement therapy is the traditional treatment for hemophilia A and B, and involves intravenous administration of FVIII or FIX, either prepared from human plasma or as recombinant proteins. In many cases, however, patients develop antibodies (also known as inhibitors) against the infused proteins, which reduces or negates the efficacy of the treatment. Recombinant FVIIa (Novoseven®) has been approved for the treatment of hemophilia A or B patients that have inhibitors to FVIII or FIX, and also is used to stop bleeding episodes or prevent bleeding associated with trauma and/or surgery. Recombinant FVIIa also has been approved for the treatment of patients with congenital FVII deficiency, and is increasingly being utilized in off-label uses, such as the treatment of bleeding associated with other congenital or acquired bleeding disorders, trauma, and surgery in non-hemophilic patients.

[0010] The use of recombinant FVIIa to promote clot formation underlines its growing importance as a therapeutic agent. FVIIa therapy leaves significant unmet medical need. For example, based on clinical trial data, an average of 3 doses of FVIIa over a 6 hour or more time period are required to manage acute bleeding episodes in hemophilia patients. More efficacious variants of FVIIa are needed to reduce these requirements. Therefore, among the objects herein, it is an object to provide modified FVII polypeptides that are designed to have improved therapeutic properties.

### SUMMARY

[0011] Provided herein are modified Factor VII (FVII) polypeptides. In particular, provided herein are modified FVII polypeptides that exhibit procoagulant activities. The FVII polypeptides are modified in primary sequence compared to an unmodified FVII polypeptide, and can include, amino acid insertions, deletions and replacements. Modified FVII polypeptides provided herein include FVII polypeptides that exhibit increased resistance to the inhibitory affects of tissue factor tissue factor pathway inhibitor (TFPI), increased resistance to the inhibitory affects antithrombin-III (AT-III), decreased Zn²⁺ binding, improved pharmacokinetic properties, such as increased half-life, increased catalytic activity in the presence and/or or absence of TF, and/or increased binding to activated platelets. The modified FVII polypeptides can contain any combination of modifications provided herein, whereby one or more activities or properties of the polypeptide are altered compared to an unmodified FVII polypeptide. Typically the modified FVII polypeptide retains procoagulant activity. Also provided herein are nucleic acid molecules, vectors and cells that encode/express modified FVII polypeptides. Pharmaceutical compositions, articles of manufacture, kits and methods of treatment also are provided herein. FVII polypeptides include allelic and species variants and polypeptides and other variants that have modifications that affect other activities and/or properties. Also included are active fragments of the FVII polypeptides that include a modification provided herein. Exemplary of FVII polypeptides are those that include the sequence of amino acids set forth in SEQ ID NO:3, as well as variants thereof having 60%, 65%, 70%, 75%, 80%, 85%, 88%, 90%, 91%, 92%, 93%, 94%, 95%, 96%, 97%, 98%, 99% or more sequence identity therewith.

[0012] In particular, provided are modified factor VII (FVII) polypeptides allelic and species variant thereof or active fragments or other variants thereof. Provided herein are FVII polypeptides, including allelic and species variant thereof or active fragments thereof, that contain a modification that is at a position corresponding to position D196, K197 or K199 in a FVII polypeptide with a sequence of amino acids set forth in SEQ ID NO:3, or in corresponding residues in a FVII polypeptide, including allelic and species variants thereof, active fragments, and other FVII polypeptides modified for other activities or properties. The FVII polypeptides contain at least one modification at a position corresponding to position D196, K197 or K199 in a FVII polypeptide containing a sequence of amino acids as set forth in SEQ ID NO:3 or in corresponding residues in a FVII polypeptide. The modification is an insertion and/or replacement by a hydrophobic or acidic amino acid selected from among Val (V), Leu (L), Ile (I), Phe (F), Trp (W), Met (M), Tyr (Y), Cys (C), Asp (D) and Glu (E). When an active fragment is provided, the active fragment includes such modification. For example, provided are modified factor VII (FVII) polypeptides allelic and species variant thereof or active fragments or other variants thereof that also include a replacement selected from among D196F, D196W, D196L, D196I, D196Y, K197E, K197D, K197L, K197M, K197I, K197V, K197F, K197W, K199D, K199E and K197Y.

[0013] Additionally, modified FVII polypeptides provided can contain a further modification, including an amino acid replacement, insertion or deletion, at another position in the FVII polypeptide. In some examples, the further modification is an amino acid replacement at a position corresponding to a position selected from among D196, K197, K199, G237, T239, R290 and K341, wherein the first modification and second modification are at different amino acids. These modification can include, but are not limited to D196K, D196R, D196A, D196Y, D196F, D196W, D196L, D196I, K197Y, K197A, K197E, K197D, K197L, K197M, K197I, K197V, K197F, K197W, K199A, K199D, K199E, G237W, G237T, G237I, G237V, T239A, R290A, R290E, R290D, R290N, R290Q, R290K, K341E, K341R, K341N, K341M, K341D and K341Q. Other examples modifications that are amino acid insertions, such, as, but not limited to, any of the following insertions: G237T238insA, G237T238insS, G237T238insV, G237T238insAS, G237T238insSA, D196K197insK, D196K197insR, D196K197insY, D196K197insW, D196K197insA, D196K197insM, K1971198insE, K1971198insY, K1971198insA and K1971198insS. Other exemplary modified FVII polypeptides include the modifications as follows: D196R/K197E/K199E, D196K/K197E/K199E, D196R/K197E/K199E/R290E, D196R/K197M/K199E, D196R/K197M/K199E/R290E, D196K/K197L, D196F/K197L, D196L/K197L, D196M/K197L, D196W/K197L, D196F/K197E, D196W/K197E, K196V/K197E, K197E/K341Q, K197L/K341Q, K197E/G237V/K341Q, K197E/K199E, K197E/G237V, K199E/K341Q or K197E/K199E/K341Q.

[0014] Also provided are modified FVII polypeptides, including allelic and species variant thereof or active fragments or other variants thereof, that also can contain amino acid modifications corresponding to any one or more of D196R, D196Y, D196F, D196W, D196L, D196I, K197Y, K197E, K197D, K197L, K197M, K197M, K197I, K197V, K197F, K197W, K199D, K199E, G237W, G237I, G237V, R290M, R290V, K341M, K341D, G237T238insA, G237T238insS, G237T238insV, G237T238insAS, G237T238insSA, D196K197insK, D196K197insR, D196K197insY, D196K197insW, D196K197insA, D196K197insM, K1971198insE, K1971198insY, K1971198insA or K1971198insS in a FVII polypeptide having a sequence of amino acids set forth in SEQ ID NO:3 or in corresponding residues in a FVII polypeptide. Additionally, these modified FVII polypeptides can contain a further modification, including an amino acid replacement, insertion or deletion, at another position in the FVII polypeptide. In some examples, the further modification can be an amino acid replacement at a position corresponding to a position D196, K197, K199, G237, T239, R290 and K341, wherein the further modification is a different position from the first modification. For example, the modified FVII polypeptide can additionally contain an amino acid replacement selected from among D196K, D196R, D196A, D196Y, D196F, D196M, D196W, D196L, D196I, K197Y, K197A, K197E, K197D, K197L, K197M, K197I, K197V, K197F, K197W, K199A, K199D, K199E, G237W, G237T, G237I, G237V, T239A, R290A, R290E, R290D, R290N, R290Q, R290K, K341E, K341R, K341N, K341M, K341D, and K341Q. Exemplary of such modified FVII polypeptide are those that include modifications selected from among D196R/R290E, D196R/R290D, D196R/K197E/K199E, D196K/K197E/K199E, D196R/K197E/K199E/R290E, D196R/K197M/K199E, D196R/K197M/K199E/R290E, D196K/K197L, D196F/K197L, D196L/K197L, D196M/K197L, D196W/K197L, D196F/K197E, D196W/K197E, K197L/K341Q, G237V/K341Q, K197E/G237V/K341Q, K197E/K199E, K197E/G237V, K199E/K341Q, K197E/K199E/K341Q and K196V/K197E.

[0015] In some instances, a modified factor VII (FVII) polypeptide, including allelic and species variant thereof or active fragments thereof or other variants thereof can include two or more modifications in a FVII polypeptide, where at least two of the amino acid modifications correspond to D196K, D196R, D196A, D196Y, D196F, D196M, D196W, D196L, D196I, K197Y, K197A, K197E, K197D, K197L, K197M, K197I, K197V, K197F, K197W, K199A, K199D, K199E, G237W, G237T, G237I, G237V, T239A, R290A, R290E, R290D, R290N, R290Q, R290K, K341E, K341R, K341N, K341M, K341D, K341Q, G237T238insA, G237T238insS, G237T238insV, G237T238insAS, G237T238insSA, D196K197insK, D196K197insR, D196K197insY, D196K197insW, D196K197insA, D196K197insM, K1971198insE, K1971198insY, K1971198insA or K1971198insS in a FVII polypeptide having or including a sequence of amino acids set forth in SEQ ID NO:3 or in corresponding residues in a FVII polypeptide. The polypeptide can include more than two modifications, such as 2, 3, 4, 5, 6 or 7 modifications.

[0016] Exemplary of these are FVII polypeptides that include comprising modifications selected from among D196R/R290E, D196K/R290E, D196R/R290D, D196R/K197E/K199E, D196K/K197E/K199E, D196R/K197E/K199E/R290E, D196R/K197M/K199E, D196R/K197M/K199E/R290E, D196K/K197L, D196F/K197L, D196L/K197L, D196M/K197L, D196W/K197L, D196F/K197E, D196W/K197E, D196V/K197E, K197E/K341Q, K197L/K341Q, G237V/K341Q, K197E/G237V/K341Q, K197E/K199E, K197E/G237V, K199E/K341Q, K197E/K199E/K341Q and K197E/G237V/M298Q.

[0017] Any of the above-mentioned modified FVII polypeptides can exhibit increased resistance to tissue factor pathway inhibitor (TFPI) compared with the unmodified FVII polypeptide. In some examples, the modified FVII polypeptide is at least about or is 1%, 2%, 3%, 4%, 5%, 6%, 7%, 8%, 9%, 10%, 20%, 30%, 40%, 50%, 60%, 70%, 80%, 90%, 91%, 92%, 93%, 94%, 95%, 96%, 97%, 98%, 99%, 100%, 200%, 300%, 400%, 500% or more resistant to TFPI. Additionally, these modified FVII polypeptides also can contain a heterologous Gla domain, or a sufficient portion thereof to effect phospholipid binding.

[0018] Also provided herein are modified FVII polypeptides that contain a heterologous Gla domain, or a sufficient portion thereof, such as 30%, 40%, 50%, 60%, 70%, 80%, 90%, 91%, 92%, 93%, 94%, 95%, 96%, 97%, 98%, 99%, or more of the heterologous Gla domain, to effect phospholipid binding. Any and all of the above-noted modified FVII polypeptides also can include a Gla swap, including Gla swaps as exemplified and described herein.

[0019] A heterologous Gla domain can be selected from the Gla domains of Factor IX (FIX), Factor X (FX), prothrombin, protein C, protein S, osteocalcin, matrix Gla protein, Growth-arrest-specific protein 6 (Gas6) or protein Z. In some examples, the heterologous Gla domain in the modified FVII polypeptide provided herein has a sequence of amino acids set forth in any of SEQ ID NOS: 110-118, 120 and 121, or a sufficient portion thereof to effect phospholipid binding. The modifications to the FVII polypeptide can be effected by removing all or a contiguous portion of the native FVII Gla domain, which can include amino acids 1-45 in a FVII polypeptide having or including a sequence of amino acids set forth in SEQ ID NO:3, or in corresponding residues in a FVII polypeptide, and replacing it with the heterologous Gla domain, or a sufficient portion thereof to affect phospholipid binding, such as to increase it. Such modifications can result in the modified FVII polypeptide exhibiting increased phospholipid binding compared with the unmodified FVII polypeptide. For example, the modified FVII polypeptide can exhibit at least about or 1%, 2%, 3%, 4%, 5%, 6%, 7%, 8%, 9%, 10%, 20%, 30%, 40%, 50%, 60%, 70%, 80%, 90%, 91%, 92%, 93%, 94%, 95%, 96%, 97%, 98%, 99%, 100%, 200%, 300%, 400%, 500% or more increased phospholipid binding.

[0020] The modified FVII polypeptides can have all or a contiguous portion of the native FVII Gla domain is removed and is replaced with the heterologous Gla domain, or a sufficient portion thereof to effect phospholipid binding. Exemplary of such polypeptides are those in which the native FVII Gla domain includes amino acids 1-45 in a FVII polypeptide having or including a sequence of amino acids set forth in SEQ ID NO:3, or in corresponding residues in a FVII polypeptide. Gla modifications include, but are not limited to, modifications among a Gla Swap FIX, Gla Swap FX, Gla Swap Prot C, Gla Swap Prot S and Gla Swap Thrombin.

[0021] By virtue of a Gla swap the modified FVII polypeptide can exhibit increased phospholipid binding. Such increase can be at least about or 0.5%, 1%, 2%, 3%, 4%, 5%, 6%, 7%, 8%, 9%, 10%, 20%, 30%, 40%, 50%, 60%, 70%, 80%, 90%, 91%, 92%, 93%, 94%, 95%, 96%, 97%, 98%, 99%, 100%, 200%, 300%, 400%, 500% or more increased phospholipid binding.

[0022] The modified FVII polypeptides containing heterologous Gla domains can contain further modifications at positions that result in or exhibit increased resistance to tissue factor pathway inhibitor (TFPI) compared to an unmodified FVII polypeptide. Exemplary of such modifications are one or more amino acid modification(s) at positions selected from among D196, K197, K199, G237, T239, R290, and K341 in a FVII polypeptide having or including a sequence of amino acids set forth in SEQ ID NO:3 or in corresponding residues in a FVII polypeptide. Specifically, such modifications can include one or more amino acid modification(s) are selected from among D196K, D196R, D196A, D196Y, D196F, D196M, D196W, D196L, D196I, K197Y, K197A, K197E, K197D, K197L, K197M, K197I, K197V, K197F, K197W, K199A, K199D, K199E, G237W, G237T, G237I, G237V, T239A, R290A, R290E, R290D, R290N, R290Q, R290K, K341E, K341R, K341N, K341M, K341D, K341Q, G237T238insA, G237T238insS, G237T238insV, G237T238insAS, G237T238insSA, D196K197insK, D196K197insR, D196K197insY, D196K197insW, D196K197insA, D196K197insM, K1971198insE, K1971198insY, K1971198insA and K1971198insS. For example, the modified FVII polypeptides containing a heterologous Gla domain also can contain the amino acid replacements and/or insertions such as, but not limited to, D196R/R290E, D196K/R290E, D196R/R290D, D196R/K197E/K199E, D196K/K197E/K199E, D196R/K197E/K199E/R290E, D196R/K197M/K199E, and D196R/K197M/K199E/R290E.

In some instances, such further modifications result in an increased resistant to TFPI of the modified polypeptide compared to the FVII polypeptide not containing the modification, i.e. the unmodified FVII polypeptide.

[0023] Any of the modified FVII polypeptides described above, including those that exhibit increased resistance to TFPI or increased binding to phospholipids, or any combination thereof, can additionally contain other modifications, including any described in the art. Such further amino acid modifications can increase resistance to antithrombin-III (AT-III), increase binding and/or affinity to phospholipids, increase affinity for tissue factor (TF), increase intrinsic activity, alter the conformation of the polypeptide to alter zymogenicity, including altering the conformation to a more zymogen-like shape or a less zymogen-like shape, increase resistance to proteases, decrease glycosylation, increase glycosylation, reduce immunogenicity, increase stability, and/or facilitate chemical group linkage. For example, the modified FVII polypeptides provided herein can contain modification(s) at position Q176, M298 or E296 in a FVII polypeptide having or including a sequence of amino acids set forth in SEQ ID NO:3 or in corresponding residues in a FVII polypeptide. In some examples, the modified FVII polypeptides can additionally contain amino acid modification are from among Q176A, M298Q, E296V and/or E296A. In other examples, the modified FVII polypeptides can additionally contain, in addition to the Gla swap and/or other noted modifications, one or more of the following further amino acid modification(s): S278C/V302C, L279C/N301C, V280C/V301C, S281C/V299C, insertion of a tyrosine at position 4, F4S, F4T, P10Q, P10E, P10D, P10N, Q21N, R28F, R28E, I30C, I30D, I30E, K32D, K32Q, K32E, K32G, K32H, K32T, K32C, K32A, K32S, D33C, D33F, D33E, D33K, A34C, A34E, A34D, A34I, A34L, A34M, A34V, A34F, A34W, A34Y, R36D, R36E, T37C, T37D, T37E, K38C, K38E, K38T, K38D, K38L, K38G, K38A, K38S, K38N, K38H, L39E, L39Q, L39H, W41N, W41C, W41E, W41D, I42R, I42N, I42S, I42A, I42Q, I42N, I42S, I42A, I42Q, I42K, S43Q, S43N, Y44K, Y44C, Y44D, Y44E, S45C, S45D, S45E, D46C, A51N, S53N, G58N, G59S, G59T, K62E, K62R, K62D, K62N, K62Q, K62T, L65Q, L65S, L65N, F71D, F71Y, F71E, F71Q, F71N, P74S, P74A, A75E, A75D, E77A, E82Q, E82N, E82S, E82T T83K, N95S, N95T, G97S, G97T, Y101N, D104N, T106N, K109N, E116D, G117N, G124N, S126N, T128N, L141C, L141D, L141E, E142D, E142C, K143C, K143D, K143E, R144E, R144C, R144D, N145Y, N145G, N145F, N145M, N145S, N145I, N145L, N145T, N145V, N145P, N145K, N145H, N145Q, N145E, N145R, N145W, N145D, N145C, K157V, K157L, K157I, K157M, K157F, K157W, K157P, K157G, K157S, K157T, K157C, K157Y, K157N, K157E, K157R, K157H, K157D, K157Q, V158L, V158I, V158M, V158F, V158W, V158P, V158G, V158S, V158T, V158C, V158Y, V158N, V158E, V158R, V158K, V158H, V158D, V158Q, A175S, A175T, G179N, I186S, I186T, V188N, R202S, R202T, I205S, I205T, D212N, E220N, I230N, P231N, P236N, G237N, Q250C, V253N, E265N, T267N, E270N, A274M, A274L, A274K, A274R, A274D, A274V, A274I, A274F, A274W, A274P, A274G, A274T, A274C, A274Y, A274N, A274E, A274H, A274S, A274Q, F275H, R277N, F278S, F278A. F278N, F278Q, F278G, L280N, L288K, L288C, L288D, D289C, D289K, L288E, R290C, R290G, R290A, R290S, R290T, R290K, R290D, R290E, G291E, G291D, G291C, G291N, G291K, A292C, A292K, A292D, A292E, T293K, E296V, E296L, E296I, E296M, E296F, E296W, E296P, E296G, E296S, E296T, E296C, E296Y, E296N, E296K, E296R, E296H, E296D, E296Q, M298Q, M298V, M298L, M298I, M298F, M298W, M298P, M298G, M298S, M298T, M298C, M298Y, M298N, M298K, M298R, M298H, M298E, M298D, P303S, P303ST, R304Y, R304F, R304L, R304M, R304G, R304T, R304A, R304S, R304N, L305V, L305Y, L305I, L305F, L305A, L305M, L305W, L305P, L305G, L305S, L305T, L305C, L305N, L305E, L305K, L305R, L305H, L305D, L305Q, M306D, M306N, D309S, D309T, Q312N, Q313K, Q313D, Q313E, S314A, S314V, S314I, S314M, S314F, S314W, S314P, S314G, S314L, S314T, S314C, S314Y, S314N, S314E, S314K, S314R, S314H, S314D, S314Q, R315K, R315G, R315A, R315S, R315T, R315Q, R315C, R315D, R315E, K316D, K316C, K316E, V317C, V317K, V317D, V317E, G318N, N322Y, N322G, N322F, N322M, N322S, N322I, N322L, N322T, N322V, N322P, N322K, N322H, N322Q, N322E, N322R, N322W, N322C, G331N, Y332S, Y332A, Y332N, Y332Q, Y332G, D334G, D334E, D334A, D334V, D334I, D334M, D334F, D334W, D334P, D334L, D334T, D334C, D334Y, D334N, D334K, D334R, D334H, D334S, D334Q, S336G, S336E, S336A, S336V, S336I, S336M, S336F, S336W, S336P, S336L, S336T, S336C, S336Y, S336N, S336K, S336R, S336H, S336D, S336Q, K337L, K337V, K337I, K337M, K337F, K337W, K337P, K337G, K337S, K337T, K337C, K337Y, K337N, K337E, K337R, K337H, K337D, K337Q, K341E, K341Q, K341G, K341T, K341A, K341S, G342N, H348N, R353N, Y357N, 1361N, F374P, F374A, F374V, F374I, F374L, F374M, F374W, F374G, F374S, F374T, F374C, F374Y, F374N, F374E, F374K, F374R, F374H, F374D, F374Q, V376N, R379N, L390C, L390K, L390D, L390E, M391D, M391C, M391K, M391N, M391E, R392C, R392D, R392E, S393D, S393C, S393K, S393E, E394K, P395K, E394C, P395D, P395C, P395E, R396K, R396C, R396D, R396E, P397D, P397K, P397C, P397E, G398K, G398C, G398D, G398E, V399C, V399D, V399K, V399E, L400K, L401K, L401C, L401D, L401E, R402D, R402C, R402K, R402E, A403K, A403C, A403D, A403E, P404E, P404D, P404C, P404K, F405K, P406C, K32N/A34S, K32N/A34T, F31N/D33S, F31N/D33T, 130N/K32S, 130N/K32T, A34N/R36S, A34N/R36T, K38N/F40S, K38N/F40T, T37N/L39S, T37N/L39T, R36N/K38S, R36N/K38T, L39N/W41S, L39N/W41T, F40N/142S, F40N/142T, I42N/Y44S, I42N/Y44T, Y44N/D46S, Y44N/D46T, D46N/D48S, D46N/D48T, G47N/Q49S, G47N/Q49T, K143N/N145S, K143N/N145T, E142N/R144S, E142N/R144T, L141N/K143S, L141N/K143T, I140N/E142S/, I140N/E142T, R144N/A146S, R144N/A146T, A146N/K148S, A146N/K148T, S147N/P149S/, S147N/P149T, R290N/A292S, R290N/A292T, D289N/G291S, D289N/G291T, L288N/R290S, L288N/R290T, L287N/D289S, L287N/D289, A292N/A294S, A292N/A294T, T293N/L295S, T293N/L295T, R315N/V317S, R315N/V317T, S314N/K316S, S314N/K316T, Q313N/R315S, Q313N/R315T, K316N/G318S, K316N/G318T, V317N/D319S, V317N/D319T, K341N/D343S, K341N/D343T, S339N/K341S, S339N/K341T, D343N/G345S, D343N/G345T, R392N/E394S, R392N/E394T, L390N/R392S, L390N/R392T, K389N/M391S, K389N/M391T, S393N/P395S, S393N/P395T, E394N/R396S, E394N/R396T, P395N/P397S, P395N/P397T, R396N/G398S, R396N/G398T, P397N/V399S, P397N/V399T, G398N/L400S, G398N/L400T, V399N/L401S, V399N/L401T, L400N/R402S, L400N/R402T, L401N/A403S, L401N/A403T, R402N/P404S, R402N/P404T, A403N/F405S, A403N/F405T, P404N/P406S and P404N/P406T, V158D/G237V/E296V/M298Q, K197E/G237V/M298Q, K197E/G237V/M298Q/K341Q, K197E/K199E/G237V/M298Q/K341Q, G237V/M298Q, G237V/M298Q/K341Q, M298Q/Gla Swap FIX, K197E/M298Q and M298Q/K341D

[0024] Any of the modified FVII polypeptides provided herein can contain one or more further amino acid modification(s) that increases resistance to antithrombin-III (AT-III), increases binding and/or affinity to phospholipids, increases affinity for tissue factor (TF), increases intrinsic activity, alters the conformation of the polypeptide to alter zymogenicity, increases resistance to proteases, decreases glycosylation, increases glycosylation, reduces immunogenicity, increases stability, and/or facilitates chemical group linkage. For example, altered zymogenicity can confer a more zymogen-like shape or a less zymogen-like shape. Such modified FVII polypeptides, for example, can include substitution of positions 300-322, 305-322, 300-312, or 305-312 with the corresponding amino acids from trypsin, thrombin or FX, or substitution of positions 310-329, 311-322 or 233-329 with the corresponding amino acids from trypsin.

Modified polypeptides provided herein include those in which the unmodified FVII polypeptide contains only or include a sequence of amino acids set forth in SEQ ID NO:3. Exemplary modified FVII polypeptides are polypeptides having or including a sequence of amino acids set forth in any of SEQ ID NOS: 18-43 and 125-146 and 206-250 or allelic or species variants thereof or other variants thereof. The allelic or species variant or other variant can have 40%, 50%, 60%, 65%, 70%, 75%, 80%, 85%, 88%, 90%, 91%, 92%, 93%, 94%, 95%, 96%, 97%, 98%, 99% or more sequence identity to the polypeptide set forth in SEQ ID NO: 3, excluding the amino acid modification(s). Sources of FVII polypeptides include humans and other non-human species. The polypeptides can be mature polypeptides or precursor polypeptides. In some embodiments, only the primary sequence of the FVII polypeptide is modified. In addition, the FVII polypeptides can include a chemical modification or a post-translational modification, such as, but not limited to, glycosylation, carboxylation, hydroxylation, sulfonation, phosphorylation, albumination, or conjugation to another moiety, such as a polyethylene glycol (PEG) moiety.

[0025] The modified FVII polypeptides can be provided as single-chain polypeptides or as mixtures of single-chain and two-chain or multiple chain forms, or as two-chain, three-chain or other multiple chain forms. The modified FVII polypeptides can be provided as inactive or as activated polypeptides. Activation can be effected, for example, by proteolytic cleavage by autoactivation, cleavage by Factor IX (FIXa), cleavage by Factor X (FXa), cleavage by Factor XII (FXIIa), or cleavage by thrombin.

[0026] The modified FVII polypeptides typically retain one or more activities or properties of the unmodified FVII polypeptide. Modifications can include modifications at 1, 2, 3, 4, 5, 6, 7, 8, 9, 10, 20, 30, 40, 50 or 60 amino acid positions so long as the polypeptide retains at least one FVII activity of the unmodified FVII polypeptide. Retention of activity can be at least about or 1%, 2%, 3%, 4%, 5%, 10%, 20%, 30%, 40%, 50%, 60%, 70%, 80%, 90%, 95%, 96%, 97%, 98%, 99%, 100%, 200%, 300%, 400%, 500%, or more of the activity of the unmodified FVII polypeptide. Activities include, for example, tissue factor (TF) binding, factor X (FX) activation, Factor IX (FIX) activation, phospholipid binding, and coagulation activity. Activities can be increased or decreased. Among the modified polypeptides provided herein are those in which coagulation activity is increased. Activity can be assessed in vitro or in vivo.

[0027] Also provided are nucleic acid molecule that include a sequence of nucleotides that encodes any of the modified FVII polypeptides. Also provided are vectors, such as prokaryotic vectors or a eukaryotic vectors, including mammalian vector, such as viral vectors. Exemplary viral vectors include an adenovirus, an adeno-associated-virus, a retrovirus, a herpes virus, a lentivirus, a poxvirus, and a cytomegalovirus vectors. Also provided are cells containing the nucleic acid molecules or the vectors. The cells can be eukaryotic, such as mammalian or yeast cells, or prokaryotic cells. Mammalian cells include, for example, baby hamster kidney cells (BHK-21) or 293 cells and CHO cells. The cells can be grown under conditions whereby the modified FVII polypeptide is expressed. It can be secreted. Provided are the modified FVII polypeptide produced by such cells.

[0028] Also provided are compositions that contain the modified FVII polypeptides provided herein. In particular, provided are pharmaceutical compositions that contain such polypeptides. The compositions can contain a the therapeutically effective concentration or amount of a modified FVII polypeptide, or a nucleic acid molecule or a vector or a cell provided herein in a pharmaceutically acceptable vehicle. Pharmaceutical compositions can be formulated for single dosage or multiple dosage administration. The pharmaceutical composition can be in any form, such as a liquid, gel or solid, and provided in capsules, contains and other suitable vehicles. They can be formulated for dilution prior to administration or in any suitable form. The amount can depend upon the disorder treated and/or individual treated and, if necessary, can be determined empirically. The pharmaceutical composition can be formulated for any route of administration, including, for example, local, systemic, or topical administration, such formulated for oral, nasal, pulmonary buccal, transdermal, subcutaneous, intraduodenal, enteral, parenteral, intravenous, or intramuscular administration. The pharmaceutical compositions can be formulated for controlled release.

[0029] Also provided are methods of treatment and uses of the compositions for treatment. The pharmaceutical compositions are administered or formulated for administration to a subject who has a disease or condition that is treated by administration of FVII, including treatment by administration of active FVII (FVIIa). Treatment with the pharmaceutical composition ameliorates or alleviates the symptoms associated with the disease or condition. Administration can be followed by or accompanied by monitoring a subject for changes in the symptoms associated with the FVII-mediated disease or condition. Diseases or conditions treated, include, but are not limited to, blood coagulation disorders, hematologic disorders, hemorrhagic disorders, hemophilias, factor VII deficiency and bleeding disorders. Exemplary of these are hemophilia A or hemophilia B or hemophilia C. The hemophilia can be congenital or acquired, such as due to a bleeding complication due to surgery or trauma. The bleeding can be manifested as acute haemarthroses, chronic haemophilic arthropathy, haematomas, haematuria, central nervous system bleedings, gastrointestinal bleedings, or cerebral haemorrhage, ad can result from, for example, dental extraction or surgery, such as, for example, angioplasty, lung surgery, abdominal surgery, spinal surgery, brain surgery, vascular surgery, dental surgery, or organ transplant surgery, such as transplantation of bone marrow, heart, lung, pancreas, and liver. The subject can have autoantibodies to factor VIII or factor IX. The treatment can be accompanied by or administered sequentially or intermittently with one or more additional coagulation factors, such as, for example, plasma purified or recombinant coagulation factors, procoagulants, such as vitamin K, vitamin K derivative and protein C inhibitors, plasma, platelets, red blood cells and corticosteroids. The pharmaceutical compositions can be used with compositions that contain such other coagulation factors.

[0030] Provided are articles of manufacture that contain packaging material and a pharmaceutical composition provided contained within the packaging material, and optionally instructions for administration. For example, the modified FVII polypeptide in the pharmaceutical composition can be for treatment of a FVII-mediated disease or disorder, and the packaging material can includes a label that indicates that the modified FVII polypeptide is used for treatment of a FVII-mediated disease or disorder. Also provided are kits containing the pharmaceutical compositions and a device for administration of the composition and, optionally, instructions for administration.

### BRIEF DESCRIPTION OF THE FIGURES

[0031] FIG. 1 depicts the coagulation cascade. The figure shows the intrinsic pathway and the extrinsic pathway of coagulation for the independent production of FXa and convergence of the pathways to a common pathway to generate thrombin and fibrin for the formation of a clot. These pathways are interconnected. The figure depicts the order of molecules involved in the activation cascade in which a zymogen is converted to an activated protease by cleavage of one or more peptide bonds. The activated protease then serves as the activating protease for the next zymogen molecule in the cascade, ultimately resulting in clot formation.

[0032] FIG. 2 depicts the cell based model of coagulation (see e.g. Hoffman et al. (2001) Thromb Haemost 85:958-965. The figure depicts the coagulation events as being separated into three phases, where initiation of coagulation is effected by the activation of FX to FXa by the TF/FVIIa complex on the TF-bearing cell, resulting in the generation of a small amount of thrombin after activation by FXa/FVa. Amplification takes place when thrombin binds to and activates the platelets, and initiates the activation of sufficient quantities of the appropriate coagulation factors to form the FVIIIa/FIXa and FVa/FXa complexes. Propagation of coagulation occurs on the surface of large numbers of activated platelets at the site of injury, resulting in a burst of thrombin generation that is sufficiently large to generate enough fibrin from fibrinogen to establish a clot at the site of injury.

[0033] FIG. 3 depicts the mechanisms by which FVIIa can initiate thrombin formation. The figure illustrates the TF-dependent pathway of FVIIa thrombin generation, which acts at the surface of a TF-bearing cell and involves complexing of FVIIa with TF prior to activation of FX to FXa. The figure also depicts the TF-independent pathway of FVIIa thrombin generation, during which FVIIa binds to phospholipids on the activated platelet and activates FX to FXa, which in turn complexes with FVa to cleave prothrombin into thrombin.

[0034] FIG. 4 depicts the quaternary inhibitory complex that results when the TFPI/FXa complex binds to the TF/FVIIa complex. TFPI contains three Kunitz domains. The Kunitz domain 2 (K-2) interacts with and inhibits FXa, while the Kunitz domain (K-1) interacts with and inhibits FVIIa.

[0035] FIG. 5 depicts the alignment of the amino acid sequence of the first Kunitz domains of (a) BPTI^{5L15} (amino acid positions 1 to 55 of SEQ ID NO:106) and TFPI-2 (amino acid positions 14-65 of SEQ ID NO:105), and (b) TFPI-1 (amino acid positions 26-76 of SEQ ID NO:102) and TFPI-2 (amino acid positions 14-65 of SEQ ID NO:105), and shows conserved amino acids.

[0036] FIG. 6 depicts the homology model used to determine the contact resides at the interface of the interaction between FVIIa and TFPI. The structure of Kunitz domain 1 (K1) of TFPI-2 was taken from the trypsin/TFPI complex crystal structure and modeled onto BPTI^{5L15} on the TF/FVIIa/BPTI^{5L15} crystal structure. In silico mutagenesis was performed to fit the corresponding amino acids of TFPI-1 K1 to the model. The contact residues of FVIIa that are likely involved in interaction with TFPI at the protein-protein interface were identified and established as candidates for mutagenesis in the development of TFPI-resistant FVII polypeptides.

[0037] FIG. 7 depicts the modeled interaction between FVIIa and TFPI. In particular, the figure depicts the FVII contact residues that are present at the interface of the FVIIa and TFPI interaction, and the corresponding TFPI contact residues, that form complementary electrostatic contacts.

### DETAILED DESCRIPTION

Outline

| A. | Definitions | |
|---|---|---|
| B. | Hemostasis Overview | |
| | 1. | Platelet adhesion and aggregation |
| | 2. | Coagulation cascade |

| | |
|---|---|
| a. | Initiation |
| b. | Amplification |
| c. | Propagation |

| | 3. | Regulation of Coagulation |
|---|---|---|
| C. | Factor VII (FVII) | |
| | 1. | FVII structure and organization |
| | 2. | Post-translational modifications |
| | 3. | FVII processing |
| | 4. | FVII activation |
| | 5. | FVII function |

| | |
|---|---|
| a. | Tissue factor-dependent FVIIa activity |
| b. | Tissue factor-independent FVIIa activity |

| | 6. | FVII as a biopharmaceutical |
|---|---|---|
| D. | Modified FVII polypeptides | |
| | 1. | Resistance to inhibitors |

| | |
|---|---|
| a. | TFPI |
| | Modifications to effect increased resistance to |
| | TFPI |
| b. | Antithrombin III (AT-III) |
| | Modifications to effect increased resistance to |
| | AT-III |

| | |
|---|---|
| 2. | Binding to Activated Platelets |

Modification by introduction of a heterologous Gla domain

| | |
|---|---|
| 3. | Combinations and additional modifications |

| | |
|---|---|
| a. | Modifications that increase intrinsic activity |
| b. | Modifications that increase resistance to proteases |
| c. | Modifications that increase binding to phospholipids |
| d. | Modifications that alter glycosylation |
| e. | Modifications that facilitate chemical group linkage |
| f. | Exemplary FVII combination mutants |

| E. | Design and methods for modifying FVII | |
|---|---|---|
| | 1. | Rational |
| | 2. | Emperical (i.e. screening) |

| | |
|---|---|
| a. | random mutagenesis |
| b. | Focused mutagenesis |
| c. | Screening |

| | 3. | Selecting FVII variants |
|---|---|---|
| F. | Production of FVII polypeptides | |
| | 1. | Vectors and cells |
| | 2. | Expression systems |

| | |
|---|---|
| a. | Prokaryotic expression |
| b. | Yeast |
| c. | Insects and insect cells |
| d. | Mammalian cells |
| e. | Plants |

| | 2. | Purification |
|---|---|---|
| | 3. | Fusion proteins |
| | 4. | Polypeptide modifications |
| | 5. | Nucelotide sequences |
| G. | Assessing modified FVII polypeptide activities | |
| | 1. | In vitro assays |

| | |
|---|---|
| a. | Post-translational modification |
| b. | Proteolytic activity |
| c. | Coagulation activity |
| d. | Binding to and/or inhibition by other proteins |
| e. | Phospholipid binding |

| | 2. | Non-human animal models |
|---|---|---|
| | 3. | Clinical assays |
| H. | Formulation and administration | |
| | 1. | Formulations |

| | |
|---|---|
| a. | Dosages |
| b. | Dosage forms |

| | 2. | Administration of modified FVII polypeptides |
|---|---|---|
| | 3. | Administration of nucleic acids encoding modified FVII |
| | | polypeptides (gene therapy) |
| I. | Therapeutic Uses | |
| | 1. | Congenital bleeding disorders |

| | |
|---|---|
| a. | Hemophilia |
| b. | FVII deficiency |
| c. | Others |

| | |
|---|---|
| 2. | Acquired bleeding disorders |

| | |
|---|---|
| a. | Chemotherapy-acquired thrombocytopenia |
| b. | Other coagulopathies |
| c. | Transplant-acquired bleeding |
| d. | Anticoagulant therapy-induced bleeding |
| e. | Aquired hemophilia |

| | |
|---|---|
| 3. | Trauma and surgical bleeding |

| | |
|---|---|
| J. | Combination Therapies |
| K. | Articles of manufacture and kits |
| L. | Examples |

### A. DEFINITIONS

[0039] Unless defined otherwise, all technical and scientific terms used herein have the same meaning as is commonly understood by one of skill in the art to which the invention(s) belong. All patents, patent applications, published applications and publications, Genbank sequences, databases, websites and other published materials referred to throughout the entire disclosure herein, unless noted otherwise, are incorporated by reference in their entirety. In the event that there are a plurality of definitions for terms herein, those in this section prevail. Where reference is made to a URL or other such identifier or address, it understood that such identifiers can change and particular information on the internet can come and go, but equivalent information can be found by searching the internet. Reference thereto evidences the availability and public dissemination of such information.

[0040] As used herein, coagulation pathway or coagulation cascade refers to the series of activation events that leads to the formation of an insoluble fibrin clot. In the coagulation cascade or pathway, an inactive protein of a serine protease (also called a zymogen) is converted to an active protease by cleavage of one or more peptide bonds, which then serves as the activating protease for the next zymogen molecule in the cascade. In the final proteolytic step of the cascade, fibrinogen is proteolytically cleaved by thrombin to fibrin, which is then crosslinked at the site of injury to form a clot.

[0041] As used herein, “hemostasis” refers to the stopping of bleeding or blood flow in an organ or body part. The term hemostasis can encompass the entire process of blood clotting to prevent blood loss following blood vessel injury to subsequent dissolution of the blood clot following tissue repair.

[0042] As used herein, “clotting” or “coagulation” refers to the formation of an insoluble fibrin clot, or the process by which the coagulation factors of the blood interact in the coagulation cascade, ultimately resulting in the formation of an insoluble fibrin clot.

[0043] As used herein, a “protease” is an enzyme that catalyzes the hydrolysis of covalent peptidic bonds. These designations include zymogen forms and activated single-, two- and multiple-chain forms thereof. For clarity, reference to proteases refer to all forms. Proteases include, for example, serine proteases, cysteine proteases, aspartic proteases, threonine and metallo-proteases depending on the catalytic activity of their active site and mechanism of cleaving peptide bonds of a target substrate.

[0044] As used herein, serine proteases or serine endopeptidases refers to a class of peptidases, which are characterized by the presence of a serine residue in the active site of the enzyme. Serine proteases participate in a wide range of functions in the body, including blood clotting and inflammation, as well as functioning as digestive enzymes in prokaryotes and eukaryotes. The mechanism of cleavage by serine proteases is based on nucleophilic attack of a targeted peptidic bond by a serine. Cysteine, threonine or water molecules associated with aspartate or metals also can play this role. Aligned side chains of serine, histidine and aspartate form a catalytic triad common to most serine proteases. The active site of serine proteases is shaped as a cleft where the polypeptide substrate binds.

[0045] As used herein, Factor VII (FVII, F7; also referred to as Factor 7, coagulation factor VII, serum factor VII, serum prothrombin conversion accelerator, SPCA, proconvertin and eptacog alpha) refers to a serine protease that is part of the coagulation cascade. FVII includes a Gla domain, two EGF domains (EGF-1 and EGF-2), and a serine protease domain (or peptidase S1 domain) that is highly conserved among all members of the peptidase S1 family of serine proteases, such as for example with chymotrypsin. The sequence of an exemplary precursor FVII having a signal peptide and propeptide is set forth in SEQ ID NO: 1. An exemplary mature FVII polypeptide is set forth in SEQ ID NO:3. FVII occurs as a single chain zymogen, a zymogen-like two-chain polypeptide and a fully activated two-chain form. Full activation, which occurs upon conformational change from a zymogen-like form, occurs upon binding to is co-factor tissue factor. Also, mutations can be introduced that result in the conformation change in the absence of tissue factor. Hence, reference to FVII includes single-chain and two-chain forms thereof, including zymogen-like and fully activated two-chain forms.

[0046] Reference to FVII polypeptide also includes precursor polypeptides and mature FVII polypeptides in single-chain or two-chain forms, truncated forms thereof that have activity, and includes allelic variants and species variants, variants encoded by splice variants, and other variants, including polypeptides that have at least 40%, 45%, 50%, 55%, 65%, 70%, 75%, 80%, 85%, 90%, 95%, 96%, 97%, 98%, 99% or more sequence identity to the precursor polypeptide set forth in SEQ ID NO: 1 or the mature form thereof. Included are modified FVII polypeptides, such as those of SEQ ID NOS:18-43, 125-150 or 206-250 and variants thereof. Also included are those that retain at least an activity of a FVII, such as TF binding, factor X binding, phospholipid binding, and/or coagulant activity of a FVII. By retaining activity, the activity can be altered, such as reduced or increased, as compared to a wild-type FVII so long as the level of activity retained is sufficient to yield a detectable effect. FVII polypeptides include, but are not limited to, tissue-specific isoforms and allelic variants thereof, synthetic molecules prepared by translation of nucleic acids, proteins generated by chemical synthesis, such as syntheses that include ligation of shorter polypeptides, through recombinant methods, proteins isolated from human and non-human tissue and cells, chimeric FVII polypeptides and modified forms thereof. FVII polypeptides also include fragments or portions of FVII that are of sufficient length or include appropriate regions to retain at least one activity (upon activation if needed) of a full-length mature polypeptide. FVII polypeptides also include those that contain chemical or posttranslational modifications and those that do not contain chemical or posttranslational modifications. Such modifications include, but are not limited to, pegylation, albumination, glycosylation, famysylation, carboxylation, hydroxylation, phosphorylation, and other polypeptide modifications known in the art.

[0047] Exemplary FVII polypeptides are those of mammalian, including human, origin. Exemplary amino acid sequences of FVII of human origin are set forth in SEQ ID NOS: 1, 2, and 3. Exemplary variants of such a human FVII polypeptide, include any of the precursor polypeptides set forth in SEQ ID NOS: 44-100. FVII polypeptides also include any of non-human origin including, but not limited to, murine, canine, feline, leporine, avian, bovine, ovine, porcine, equine, piscine, ranine, and other primate factor VII polypeptides. Exemplary FVII polypeptides of non-human origin include, for example, cow (Bos taurus, SEQ ID NO:4), mouse (Mus musculus, SEQ ID NO:5), pygmy chimpanzee (Pan paniscus, SEQ ID NO:6), chimpanzee (Pan troglodytes, SEQ ID NO:7), rabbit (Oryctolagus cuniculus, SEQ ID NO:8), rat (Rattus norvegicus, SEQ ID NO: 9), rhesus macaque (Macaca mulatta, SEQ ID NO:10), pig (Sus scrofa, SEQ ID NO:11), dog (Canis familiaris, SEQ ID NO:12), zebrafish (Brachydanio rerio, SEQ ID NO:13), Japanese pufferfish (Fugu rubripes, SEQ ID NO:14), chicken (Gallus gallus, SEQ ID NO:15), orangutan (Pongo pygmaeus, SEQ ID NO: 16) and gorilla (Gorilla gorilla, SEQ ID NO:17).

[0048] One of skill in the art recognizes that the referenced positions of the mature factor VII polypeptide (SEQ ID NO: 3) differ by 60 amino acid residues when compared to the isoform a precursor FVII polypeptide set forth in SEQ ID NO: 1, which is the isoform a factor VII polypeptide containing the signal peptide and propeptide sequences. Thus, the first amino acid residue of SEQ ID NO: 3 “corresponds to” the sixty first (61st) amino acid residue of SEQ ID NO: 1. One of skill in the art also recognizes that the referenced positions of the mature factor VII polypeptide (SEQ ID NO: 3) differ by 38 amino acid residues when compared to the precursor FVII polypeptide set forth in SEQ ID NO:2, which is the isoform b factor VII polypeptide containing the signal peptide and propeptide sequences. Thus, the first amino acid residue of SEQ ID NO: 3 “corresponds to” the thirty-nineth (39^{th}) amino acid residue of SEQ ID NO:2.

[0049] As used herein, corresponding residues refers to residues that occur at aligned loci. Related or variant polypeptides are aligned by any method known to those of skill in the art. Such methods typically maximize matches, and include methods such as using manual alignments and by using the numerous alignment programs available (for example, BLASTP) and others known to those of skill in the art. By aligning the sequences of polypeptides, one skilled in the art can identify corresponding residues, using conserved and identical amino acid residues as guides. For example, by aligning the sequences of factor VII polypeptides, one of skill in the art can identify corresponding residues, using conserved and identical amino acid residues as guides. For example, the alanine in amino acid position 1 (A1) of SEQ ID NO:3 (mature factor VII) corresponds to the alanine in amino acid position 61 (A61) of SEQ ID NO:1, and the alanine in amino acid position 39 (A39) of SEQ ID NO:2. In other instances, corresponding regions can be identified. For example, the Gla domain corresponds to amino acid positions A1 through F45 of SEQ ID NO:3, to amino acid positions A61 through S105 of SEQ ID NO:1 and to amino acid positions A39 to S83 of SEQ ID NO:3. One skilled in the art also can employ conserved amino acid residues as guides to find corresponding amino acid residues between and among human and non-human sequences. For example, amino acid residues S43 and E163 of SEQ ID NO:3 (human) correspond to S83 and E203 of SEQ ID NO: 4 (bovine). Corresponding positions also can be based on structural alignments, for example by using computer simulated alignments of protein structure. In other instances, corresponding regions can be identified.

[0050] As used herein, a “proregion,” “propeptide,” or “pro sequence,” refers to a region or a segment that is cleaved to produce a mature protein. This can include segments that function to suppress proteolytic activity by masking the catalytic machinery and thus preventing formation of the catalytic intermediate (i.e., by sterically occluding the substrate binding site). A proregion is a sequence of amino acids positioned at the amino terminus of a mature biologically active polypeptide and can be as little as a few amino acids or can be a multidomain structure.

[0051] As used herein, “mature factor VII” refers to a FVII polypeptide that lacks a signal sequence and a propeptide sequence. Typically, a signal sequence targets a protein for secretion via the endoplasmic reticulum (ER)-golgi pathway and is cleaved following insertion into the ER during translation. A propeptide sequence typically functions in post-translational modification of the protein and is cleaved prior to secretion of the protein from the cell. Thus, a mature FVII polypeptide is typically a secreted protein. In one example, a mature human FVII polypeptide is set forth in SEQ ID NO:3. The amino acid sequence set forth in SEQ ID NO:3 differs from that of the precursor polypeptides set forth in SEQ ID NOS:1 and 2 in that SEQ ID NO:3 is lacking the signal sequence, which corresponds to amino acid residues 1-20 of SEQ ID NOS:1 and 2; and also lacks the propeptide sequence, which corresponds to amino acid residues 21-60 of SEQ ID NO:1 and amino acid residues 21-38 of SEQ ID NO:2. Reference to a mature FVII polypeptide encompasses the single-chain zymogen form and the two-chain form.

[0052] As used herein, “wild-type” or “native” with reference to FVII refers to a FVII polypeptide encoded by a native or naturally occurring FVII gene, including allelic variants, that is present in an organism, including a human and other animals, in nature. Reference to wild-type factor VII without reference to a species is intended to encompass any species of a wild-type factor VII. Included among wild-type FVII polypeptides are the encoded precursor polypeptide, fragments thereof, and processed forms thereof, such as a mature form lacking the signal peptide as well as any pre- or post-translationally processed or modified forms thereof. Also included among native FVII polypeptides are those that are post-translationally modified, including, but not limited to, modification by glycosylation, carboxylation and hydroxylation. Native FVII polypeptides also include single-chain and two-chain forms. For example, humans express native FVII. The amino acid sequence of exemplary wild-type human FVII are set forth in SEQ ID NOS: 1, 2, 3 and allelic variants set forth in SEQ ID NOS:44-100 and the mature forms thereof. Other animals produce native FVII, including, but not limited to, cow (Bos Taurus, SEQ ID NO:4), mouse (Mus musculus, SEQ ID NO:5), pygmy chimpanzee (Pan paniscus, SEQ ID NO:6), chimpanzee (Pan troglodytes, SEQ ID NO:7), rabbit (Oryctolagus cuniculus, SEQ ID NO:8), rat (Rattus norvegicus, SEQ ID NO: 9), rhesus macaque (Macaca mulatta, SEQ ID NO:10), pig (Sus scrofa, SEQ ID NO:11), dog (Canis familiaris, SEQ ID NO:12), zebrafish (Brachydanio rerio, SEQ ID NO:13) Japanese pufferfish (Fugu rubripes, SEQ ID NO:14), chicken (Gallus gallus, SEQ ID NO:15), orangutan (Pongo pygmaeus, SEQ ID NO:16) and gorilla (Gorilla gorilla, SEQ ID NO:17).

[0053] As used herein, species variants refer to variants in polypeptides among different species, including different mammalian species, such as mouse and human.

[0054] As used herein, allelic variants refer to variations in proteins among members of the same species.

[0055] As used herein, a splice variant refers to a variant produced by differential processing of a primary transcript of genomic DNA that results in more than one type of mRNA.

[0056] As used herein, a zymogen refers to a protease that is activated by proteolytic cleavage, including maturation cleavage, such as activation cleavage, and/or complex formation with other protein(s) and/or cofactor(s). A zymogen is an inactive precursor of a proteolytic enzyme. Such precursors are generally larger, although not necessarily larger, than the active form. With reference to serine proteases, zymogens are converted to active enzymes by specific cleavage, including catalytic and autocatalytic cleavage, or by binding of an activating co-factor, which generates an active enzyme. For example, generally, zymogens are present in a single-chain form. Zymogens, generally, are inactive and can be converted to mature active polypeptides by catalytic or autocatalytic cleavage at one or more proteolytic sites to generate a multi-chain, such as a two-chain, polypeptide. A zymogen, thus, is an enzymatically inactive protein that is converted to a proteolytic enzyme by the action of an activator. Cleavage can be effected by autoactivation. A number of coagulation proteins are zymogens; they are inactive, but become cleaved and activated upon the initiation of the coagulation system following vascular damage. With reference to FVII polypeptides exist in the blood plasma as zymogens until cleavage by aproteases, such as for example, activated factor IX (FIXa), activated factor X (FXa), activated factor XII (FXIIa), thrombin, or by autoactivation to produce a zymogen-like two-chain form, which then requires further conformation change for full activity.

[0057] As used herein, a “zymogen-like” protein or polypeptide refers to a protein that has been activated by proteolytic cleavage, but still exhibits properties that are associated with a zymogen, such as, for example, low or no activity, or a conformation that resembles the conformation of the zymogen form of the protein. For example, when it is not bound to tissue factor, the two-chain activated form of FVII is a zymogen-like protein; it retains a conformation similar to the uncleaved FVII zymogen, and, thus, exhibits very low activity. Upon binding to tissue factor, the two-chain activated form of FVII undergoes conformational change and acquires its full activity as a coagulation factor.

[0058] As used herein, an activation sequence refers to a sequence of amino acids in a zymogen that is the site required for activation cleavage or maturation cleavage to form an active protease. Cleavage of an activation sequence can be catalyzed autocatalytically or by activating partners.

[0059] As used herein, activation cleavage is a type of maturation cleavage, which induces a conformation change that is required for the development of full enzymatic activity. This is a classical activation pathway, for example, for serine proteases in which a cleavage generates a new N-terminus that interacts with the conserved regions of the protease, such as Asp194 in chymotrypsin, to induce conformational changes required for activity. Activation can result in production of multi-chain forms of the proteases. In some instances, single chain forms of the protease can exhibit proteolytic activity.

[0060] As used herein, “activated Factor VII” or “FVIIa” refers to any two-chain form of a FVII polypeptide. A two-chain form typically results from proteolytic cleavage, but can be produced synthetically. Activated Factor VII, thus, includes the zymogen-like two-chain form with low coagulant activity, a fully activated form (about 1000-fold more activity) that occurs upon binding to tissue factor, and mutated forms that exist in a fully activated two-chain form or undergo conformation change to a fully activated form. For example, a single-chain form of FVII polypeptide (see, e.g., SEQ ID NO:3) is proteolytically cleaved between amino acid residues R152 and I153 of the mature FVII polypeptide. The cleavage products, FVII heavy chain and FVII light chain, which are held together by a disulfide bond (between amino acid residues 135C and 162C in the FVII of SEQ ID NO:3), form the two-chain activated FVII enzyme. Proteolytic cleavage can be carried out, for example, by activated factor IX (FIXa), activated factor X (FXa), activated factor XII (FXIIa), thrombin, or by autoactivation.

[0061] As used herein, a “property” of a FVII polypeptide refers to a physical or structural property, such three-dimensional structure, pI, half-life, conformation and other such physical characteristics.

[0062] As used herein, an “activity” of a FVII polypeptide refers to any activity exhibited by a factor VII polypeptide. Such activities can be tested in vitro and/or in vivo and include, but are not limited to, coagulation or coagulant activity, pro-coaguant activity, proteolytic or catalytic activity such as to effect factor X (FX) activation or Factor IX (FIX) activation; antigenicity (ability to bind to or compete with a polypeptide for binding to an anti-FVII antibody); ability to bind tissue factor, factor X or factor IX; and/or ability to bind to phospholipids. Activity can be assessed in vitro or in vivo using recognized assays, for example, by measuring coagulation in vitro or in vivo. The results of such assays that indicate that a polypeptide exhibits an activity can be correlated to activity of the polypeptide in vivo, in which in vivo activity can be referred to as biological activity. Assays to determine functionality or activity of modified forms of FVII are known to those of skill in the art. Exemplary assays to assess the activity of a FVII polypeptide include prothromboplastin time (PT) assay or the activated partial thromboplastin time (aPTT) assay to assess coagulant activity, or chromogenic assays using synthetic substrates, such as described in Examples 4, 5 and 11, to assess catalytic or proteolytic activity.

[0063] As used herein, “exhibits at least one activity” or “retains at least one activity” refers to the activity exhibited by a modified FVII polypeptide as compared to an unmodified FVII polypeptide of the same form and under the same conditions. For example, a modified FVII polypeptide in a two-chain form is compared with an unmodified FVII polypeptide in a two-chain form, under the same experimental conditions, where the only difference between the two polypeptides is the modification under study. In another example, a modified FVII polypeptide in a single-chain form is compared with an unmodified FVII polypeptide in a single-chain form, under the same experimental conditions, where the only difference between the two polypeptides is the modification under study. Typically, a modified FVII polypeptide that retains or exhibits at least one activity of an unmodified FVII polypeptide of the same form retains a sufficient amount of the activity such that, when administered in vivo, the modified FVII polypeptide is therapeutically effective as a procoagulant therapeutic. Generally, for a modified FVII polypeptide to retain therapeutic efficacy as a procoagulant, the amount of activity that is retained is or is about 0.5%, 1%, 2%, 3%, 4%, 5%, 6%, 7%, 8%, 9%, 10%, 11%, 12%, 13%, 14%, 15%, 16%, 17%, 18%, 19%, 20%, 30%, 40%, 50%, 60%, 70%, 80%, 90%, 100%, 200%, 300%, 400%, 500% or more of the activity of an unmodified FVII polypeptide of the same form that displays therapeutic efficacy as a procoagulant. The amount of activity that is required to maintain therapeutic efficacy as a procoagulant can be empirically determined, if necessary. Typically, retention of 0.5% to 20%, 0.5% to 10%, 0.5% to 5% of an activity is sufficient to retain therapeutic efficacy as a procoagulant in vivo.

[0064] It is understood that the activity being exhibited or retained by a modified FVII polypeptide can be any activity, including, but not limited to, coagulation or coagulant activity, pro-coagulant activity; proteolytic or catalytic activity such as to effect factor X (FX) activation or Factor IX (FIX) activation; antigenicity (ability to bind to or compete with a polypeptide for binding to an anti-FVII antibody); ability to bind tissue factor, factor X or factor IX; and/or ability to bind to phospholipids. In some instances, a modified FVII polypeptide can retain an activity that is increased compared to an unmodified FVII polypeptide. In some cases, a modified FVII polypeptide can retain an activity that is decreased compared to an unmodified FVII polypeptide. Activity of a modified FVII polypeptide can be any level of percentage of activity of the unmodified polypeptide, where both polypeptides are in the same form, including but not limited to, 1% of the activity, 2%, 3%, 4%, 5%, 10%, 20%, 30%, 40%, 50%, 60%, 70%, 80%, 90%, 95%, 96%, 97%, 98%, 99%, 100%, 200%, 300%, 400%, 500%, or more activity compared to the polypeptide that does not contain the modification at issue. For example, a modified FVII polypeptide can exhibit increased or decreased activity compared to the unmodified FVII polypeptide in the same form. For example, it can retain at least about or 1%, 2%, 3%, 4%, 5%, 6%, 7%, 8%, 9%, 10%, 20%, 30%, 40%, 50%, 60%, 70%, 80%, 90%, 95%, 96%, 97%, 98% or at least 99% of the activity of the unmodified FVII polypeptide. In other embodiments, the change in activity is at least about 2 times, 3 times, 4 times, 5 times, 6 times, 7 times, 8 times, 9 times, 10 times, 20 times, 30 times, 40 times, 50 times, 60 times, 70 times, 80 times, 90 times, 100 times, 200 times, 300 times, 400 times, 500 times, 600 times, 700 times, 800 times, 900 times, 1000 times, or more times greater than unmodified FVII. The particular level to be retained is a function of the intended use of the polypeptide and can be empirically determined. Activity can be measured, for example, using in vitro or in vivo assays such as those described herein or in the Examples below.

[0065] As used herein, “coagulation activity” or “coagulant activity” or “pro-coagulant activity” refers to the ability of a polypeptide to effect coagulation. Assays to assess coagulant activity are known to those of skill in the art, and include prothromboplastin time (PT) assay or the activated partial thromboplastin time (aPTT) assay.

[0066] As used herein, “catalytic activity” or “proteolytic activity” with reference to FVII refers to the ability of a FVII protein to catalyze the proteolytic cleavage of a substrate, and are used interchangeably. Assays to assess such activities are known in the art. For example, the proteolytic activity of FVII can be measured using chromogenic substrates such as Spectrozyme FVIIa (CH3SO2-D-CHA-But-Arg-pNA), where cleavage of the substrate is monitored by absorbance and the rate of substrate hydrolysis determined by linear regression.

[0067] As used herein, “intrinsic activity” with reference to FVII refers to the catalytic, proteolytic, and/or coagulant activity of a FVII protein in the absence of tissue factor.

[0068] As used herein, domain (typically a sequence of three or more, generally 5 or 7 or more amino acids) refers to a portion of a molecule, such as proteins or the encoding nucleic acids, that is structurally and/or functionally distinct from other portions of the molecule and is identifiable. For example, domains include those portions of a polypeptide chain that can form an independently folded structure within a protein made up of one or more structural motifs and/or that is recognized by virtue of a functional activity, such as proteolytic activity. A protein can have one, or more than one, distinct domains. For example, a domain can be identified, defined or distinguished by homology of the sequence therein to related family members, such as homology to motifs that define a protease domain or a gla domain. In another example, a domain can be distinguished by its function, such as by proteolytic activity, or an ability to interact with a biomolecule, such as DNA binding, ligand binding, and dimerization. A domain independently can exhibit a biological function or activity such that the domain independently or fused to another molecule can perform an activity, such as, for example proteolytic activity or ligand binding. A domain can be a linear sequence of amino acids or a non-linear sequence of amino acids. Many polypeptides contain a plurality of domains. Such domains are known, and can be identified by, those of skill in the art. For exemplification herein, definitions are provided, but it is understood that it is well within the skill in the art to recognize particular domains by name. If needed appropriate software can be employed to identify domains.

[0069] As used herein, a protease domain is the catalytically active portion of a protease. Reference to a protease domain of a protease includes the single, two- and multi-chain forms of any of these proteins. A protease domain of a protein contains all of the requisite properties of that protein required for its proteolytic activity, such as for example, the catalytic center. In reference to FVII, the protease domain shares homology and structural feature with the chymotrypsin/trypsin family protease domains, including the catalytic triad. For example, in the mature FVII polypeptide set forth in SEQ ID NO:3, the protease domain corresponds to amino acid positions 153 to 392.

[0070] As used herein, a gamma-carboxyglutamate (Gla) domain refers to the portion of a protein, for example a vitamin K-dependent protein, that contains post-translational modifications of glutamate residues, generally most, but not all of the glutamate residues, by vitamin K-dependent carboxylation to form Gla. The Gla domain is responsible for the high-affinity binding of calcium ions and binding to negatively-charged phospholipids. Typically, the Gla domain starts at the N-terminal extremity of the mature form of vitamin K-dependent proteins and ends with a conserved aromatic residue. In a mature FVII polypeptide the Gla domain corresponds to amino acid positions 1 to 45 of the exemplary polypeptide set forth in SEQ ID NO:3. Gla domains are well known and their locus can be identified in particular polypeptides. The Gla domains of the various vitamin K-dependent proteins share sequence, structural and functional homology, including the clustering of N-terminal hydrophobic residues into a hydrophobic patch that mediates interaction with negatively charged phospholipids on the cell surface membrane. Exemplary other Gla-containing polypeptides include, but are not limited to, FIX, FX, prothrombin, protein C, protein S, osteocalcin, matrix Gla protein, Growth-arrest-specific protein 6 (Gas6), and protein Z. The Gla domains of these and other exemplary proteins are set forth in any of SEQ ID NOS: 110-121.

[0071] As used herein, “native” or “endogenous” with reference to a Gla domain refers to the naturally occurring Gla domain associated with all or a part of a polypeptide having a Gla domain. For purposes herein, a native Gla domain is with reference to a FVII polypeptide. For example, the native Gla domain of FVII, set forth in SEQ ID NO:119, corresponds to amino acids 1-45 of the sequence of amino acids set forth in SEQ ID NO:3.

[0072] As used herein, a heterologous Gla domain refers to the Gla domain from a polypeptide, from the same or different species, that is not a FVII Gla domain. Exemplary of heterologous Gla domains are the Gla domains from Gla-containing polypeptides including, but are not limited to, FIX, FX, prothrombin, protein C, protein S, osteocalcin, matrix Gla protein, Growth-arrest-specific protein 6 (Gas6), and protein Z. The Gla domains of these and other exemplary proteins are set forth in any of SEQ ID NOS: 110-118, 120 and 121.

[0073] As used herein, a contiguous portion of a Gla domain refers to at least two or more adjacent amino acids, typically 2, 3, 4, 5, 6, 8, 10, 15, 20, 30, 40 or more up to all amino acids that make up a Gla domain.

[0074] As used herein, “a sufficient portion of a Gla domain to effect phospholipid binding” includes at least one amino acid, typically, 2, 3, 4, 5, 6, 8, 10, 15 or more amino acids of the domain, but fewer than all of the amino acids that make up the domain so long as the polypeptide that contains such portion exhibits phospholipid binding.

[0075] As used herein, “replace” with respect to a Gla domain or “Gla domain swap” refers to the process by which the endogenous Gla domain of a protein is replaced, using recombinant, synthetic or other methods, with the Gla domain of another protein. In the context of a “Gla domain swap”, a “Gla domain” is any selection of amino acids from a Gla domain and adjacent regions that is sufficient to retain phospholipid binding activity. Typically, a Gla domain swap will involve the replacement of between 40 and 50 amino acids of the endogenous protein with between 40 and 50 amino acids of another protein, but can involve fewer or more amino acids.

[0076] As used herein, an epidermal growth factor (EGF) domain (EGF-1 or EGF-2) refers to the portion of a protein that shares sequence homology to a specific 30 to 40 amino acid portion of the epidermal growth factor (EGF) sequence. The EGF domain includes six cysteine residues that have been shown (in EGF) to be involved in disulfide bonds. The main structure of an EGF domain is a two-stranded beta-sheet followed by a loop to a C-terminal short two-stranded sheet. FVII contains two EGF domains: EGF-1 and EGF-2. These domains correspond to amino acid positions 46-82, and 87-128, respectively, of the mature FVII polypeptide set forth in SEQ ID NO:3.

[0077] As used herein, “unmodified polypeptide” or “unmodified FVII” and grammatical variations thereof refer to a starting polypeptide that is selected for modification as provided herein. The starting polypeptide can be a naturally-occurring, wild-type form of a polypeptide. In addition, the starting polypeptide can be altered or mutated, such that it differs from a native wild type isoform but is nonetheless referred to herein as a starting unmodified polypeptide relative to the subsequently modified polypeptides produced herein. Thus, existing proteins known in the art that have been modified to have a desired increase or decrease in a particular activity or property compared to an unmodified reference protein can be selected and used as the starting unmodified polypeptide. For example, a protein that has been modified from its native form by one or more single amino acid changes and possesses either an increase or decrease in a desired property, such as a change in a amino acid residue or residues to alter glycosylation, can be a target protein, referred to herein as unmodified, for further modification of either the same or a different property. Exemplary modified FVII polypeptides known in the art include any FVII polypeptide described in, for example, U.S. Pat. Nos. 5,580,560, 6,017,882, 6,693,075, 6,762,286 and 6806063, U.S. Patent Publication Nos. 20030100506 and 20040220106 and International Patent Publication Nos. WO1988010295, WO200183725, WO2003093465, WO200338162, WO2004083361, WO2004108763, WO2004029090, WO2004029091, WO2004111242 and WO2005123916.

[0078] As used herein, “modified factor VII polypeptides” and “modified factor VII” refer to a FVII polypeptide that has one or more amino acid differences compared to an unmodified factor VII polypeptide. The one or more amino acid differences can be amino acid mutations such as one or more amino acid replacements (substitutions), insertions or deletions, or can be insertions or deletions of entire domains, and any combinations thereof. Typically, a modified FVII polypeptide has one or more modifications in primary sequence compared to an unmodified FVII polypeptide. For example, a modified FVII polypeptide provided herein can have 1, 2, 3, 2, 5, 6, 7, 8, 9, 10, 11, 12, 13, 14, 15, 16, 17, 18, 19, 20, 30, 40, 50 or more amino acid differences compared to an unmodified FVII polypeptide. Any modification is contemplated as long as the resulting polypeptide exhibits at least one FVII activity associated with a native FVII polypeptide, such as, for example, catalytic activity, proteolytic activity, the ability to bind TF or the ability to bind activated platelets.

[0079] As used herein, “inhibitors of coagulation” refer to proteins or molecules that act to inhibit or prevent coagulation or clot formation. The inhibition or prevention of coagulation can be observed in vivo or in vitro, and can be assayed using any method known in the art including, but not limited to, prothromboplastin time (PT) assay or the activated partial thromboplastin time (aPTT) assay.

[0080] As used herein, tissue factor pathway inhibitor (TFPI, also referred to as TFPI-1) is a Kunitz-type inhibitor that is involved in the formation of a quaternary TF/FVIIa/TFPI/FXa inhibitory complex in which the activity of FVIIa is inhibited. TFPI is expressed as two different precursor forms following alternative splicing, TFPIα (SEQ ID NO:101) and TFPIβ (SEQ ID NO:103) precursors, which are cleaved during secretion to generate a 276 amino acid (SEQ ID NO:102) and a 223 amino acid (SEQ ID NO:104) mature protein, respectively. TFPI contains 3 Kunitz domains, of which the Kunitz-1 domain is responsible for binding and inhibition of FVIIa.

[0081] As used herein, TFPI-2 (also is known as placental protein 5 (PP5) and matrix-associated serine protease inhibitor (MSPI)) refers to a homolog of TFPI. The 213 amino acid mature TFPI-2 protein (SEQ ID NO:105) contains three Kunitz-type domains that exhibit 43%, 35% and 53% primary sequence identity with TFPI-1 Kunitz-type domains 1, 2, and 3, respectively. TFPI-2 plays a role in the regulation of extracellular matrix digestion and remodeling, and is not thought to be an important factor in the coagulation pathway.

[0082] As used herein, antithrombin III (AT-III) is a serine protease inhibitor (serpin). AT-III is synthesized as a precursor protein containing 464 amino acid residues (SEQ ID NO:122) that is cleaved during secretion to release a 432 amino acid mature antithrombin (SEQ ID NO:123).

[0083] As used herein, cofactors refer to proteins or molecules that bind to other specific proteins or molecules to form an active complex. In some examples, binding to a cofactor is required for optimal proteolytic activity. For example, tissue factor (TF) is a cofactor of FVIIa. Binding of FVIIa to TF induces conformational changes that result in increased proteolytic activity of FVIIa for its substrates, FX and FIX.

[0084] As used herein, tissue factor (TF) refers to a 263 amino acids transmembrane glycoprotein (SEQ ID NO:124) that functions as a cofactor for FVIIa. It is constitutively expressed by smooth muscle cells and fibroblasts, and helps to initiate coagulation by binding FVII and FVIIa when these cells come in contact with the bloodstream following tissue injury.

[0085] As used herein, activated platelet refers to a platelet that has been triggered by the binding of molecules such as collagen, thromboxane A2, ADP and thrombin to undergo various changes in morphology, phenotype and function that ultimately promote coagulation. For example, an activated platelet changes in shape to a more amorphous form with projecting fingers. Activated platelets also undergo a “flip” of the cell membrane such that phosphatidylserine and other negatively charged phospholipids that are normally present in the inner leaflet of the cell membrane are translocated to the outer, plasma-oriented surface. These membranes of the activated platelets provide the surface on which many of the reactions of the coagulation cascade are effected. Activated platelets also secrete vesicles containing such pro-coagulant factors as vWF, FV, thrombin, ADP and thromboxane A2, and adhere to one another to form a platelet plug which is stabilized by fibrin to become a clot.

[0086] As used herein, increased binding and/or affinity for activated platelets, and any grammatical variations thereof, refers to an enhanced ability of a polypeptide or protein, for example a FVII polypeptide, to bind to the surface of an activated platelet, as compared with a reference polypeptide or protein. For example, the ability of a modified FVII polypeptide to bind to activated platelets can be greater than the ability of the unmodified FVII polypeptide to bind to activated platelets. The binding and/or affinity of a polypeptide for activated platelets can be increased by at least about 1%, 2%, 3%, 4%, 5%, 6%, 7%, 8%, 9%, 10%, 20%, 30%, 40%, 50%, 60%, 70%, 80%, 90%, 100%, 200%, 300%, 400%, 500%, or more compared to the binding and/or affinity of an unmodified polypeptide. Assays to determine the binding and/or affinity of a polypeptide for activated platelets are known in the art. Binding of a FVII polypeptide to activated platelets is mediated through the interaction of amino acids in the Gla domain of the FVII polypeptide and negatively charged phospholipids, such as phosphatidylserine, on the activated platelet. As such, methods to assay for binding of polypeptides, such as FVII polypeptides, to activated platelets use membranes and vesicles that contain phospholipids, such as phosphatidylserine. For example, the ability of a polypeptide to bind to an activated platelet is reflected by the ability of the polypeptide to bind to phospholipid vesicles, which can be measured by light scattering techniques.

[0087] As used herein, increased binding and/or affinity for phospholipids, and any grammatical variations thereof, refers to an enhanced ability of a polypeptide or protein to bind to phospholipids as compared with a reference polypeptide or protein. Phospholipids can include any phospholipids, but particularly include phosphatidylserine. The binding and/or affinity of a polypeptide for phospholipids can be increased by at least about 1%, 2%, 3%, 4%, 5%, 6%, 7%, 8%, 9%, 10%, 20%, 30%, 40%, 50%, 60%, 70%, 80%, 90%, 100%, 200%, 300%, 400%, 500%, or more compared to the binding and/or affinity of an unmodified polypeptide. Assays to determine the affinity and/or binding of a polypeptide to phospholipids are known in the art. For example, FVII polypeptide binding to phospholipid vesicles can be determined by relative light scattering at 90° to the incident light. The intensity of the light scatter with the phospholipid vesicles alone and with phospholipid vesicles with FVII is measured to determine the dissociation constant. Surface plasma resonance, such as on a BIAcore biosensor instrument, also can be used to measure the affinity of FVII polypeptides for phospholipid membranes.

[0088] As used herein, increased resistance to inhibitors or “increased resistance to TFPI” or “increased resistance to AT-III” refers to any amount of decreased sensitivity of a polypeptide to the inhibitory effects of an inhibitor, such as TFPI or AT-III, compared with a reference polypeptide, such as an unmodified FVII polypeptide. For example, TFPI, complexed with FXa, binds to the TF/FVIIa complex. In doing so, it inhibits the activity of FVIIa. Hence, a modified FVII polypeptide that reduces or prevents the binding of TFPI to the TF/FVIIa complex, and therefore reduces or prevents the TFPI-mediated inhibition of FVIIa activity, displays increased resistance to TFPI. Increased resistance to an inhibitor, such as TFPI, can be assayed by assessing the binding of a modified FVII polypeptide to an inhibitor. Increased resistance to an inhibitor, such as TFPI, also can be assayed by measuring the intrinsic activity or coagulant activity of a FVII polypeptide in the presence of TFPI. Assays to determine the binding of a polypeptide to an inhibitor, such as TFPI or AT-III, are known in the art. For non-covalent inhibitors, such as, for example, TFPI, a kᵢ can be measured. For covalent inhibitors, such as, for example, AT-III, a second order rate constant for inhibition can be measured. In addition, surface plasma resonance, such as on a BIAcore biosensor instrument, also can be used to measure the binding of FVII polypeptides to TFPI, AT-III or other inhibitors. However, for covalent inhibitors such as AT-III, only an on-rate can be measured using BIAcore. Assays to determine the inhibitory effect of, for example, TFPI on FVII coagulant activity or intrinsic activity also are known in the art. For example, the ability of a modified FVII polypeptide to cleave its substrate FX in the presence or absence of TFPI can be measured, and the degree to which TFPI inhibits the reaction determined. This can be compared to the ability of an unmodified FVII polypeptide to cleave its substrate FX in the presence or absence of TFPI. A modified polypeptide that exhibits increased resistance to an inhibitor exhibits, for example, an increase of 1%, 2%, 3%, 4%, 5%, 6%, 7%, 8%, 9%, 10%, 20%, 30%, 40%, 50%, 60%, 70%, 80%, 90%, 91%, 92%, 93%, 94%, 95%, 96%, 97%, 98%, 99%, 100%, 200%, 300%, 400%, 500%, or more resistance to the effects of an inhibitor compared to an unmodified polypeptide.

[0089] As used herein, “biological activity” refers to the in vivo activities of a compound or physiological responses that result upon in vivo administration of a compound, composition or other mixture. Biological activity, thus, encompasses therapeutic effects and pharmaceutical activity of such compounds, compositions and mixtures. Biological activities can be observed in in vitro systems designed to test or use such activities. Thus, for purposes herein a biological activity of a FVII polypeptide encompasses the coagulant activity.

[0090] As used herein the term “assess”, and grammatical variations thereof, is intended to include quantitative and qualitative determination in the sense of obtaining an absolute value for the activity of a polypeptide, and also of obtaining an index, ratio, percentage, visual or other value indicative of the level of the activity. Assessment can be direct or indirect. For example, detection of cleavage of a substrate by a polypeptide can be by direct measurement of the product, or can be indirectly measured by determining the resulting activity of the cleaved substrate.

[0091] As used herein, “chymotrypsin numbering” refers to the amino acid numbering of a mature chymotrypsin polypeptide of SEQ ID NO:107. Alignment of a protease domain of another protease, such as for example the protease domain of factor VII, can be made with chymotrypsin. In such an instance, the amino acids of factor VII that correspond to amino acids of chymotrypsin are given the numbering of the chymotrypsin amino acids. Corresponding positions can be determined by such alignment by one of skill in the art using manual alignments or by using the numerous alignment programs available (for example, BLASTP). Corresponding positions also can be based on structural alignments, for example by using computer simulated alignments of protein structure. Recitation that amino acids of a polypeptide correspond to amino acids in a disclosed sequence refers to amino acids identified upon alignment of the polypeptide with the disclosed sequence to maximize identity or homology (where conserved amino acids are aligned) using a standard alignment algorithm, such as the GAP algorithm. The corresponding chymotrypsin numbers of amino acid positions 153 to 406 of the FVII polypeptide set forth in SEQ ID NO:3 are provided in Table 1. The amino acid positions relative to the sequence set forth in SEQ ID NO:3 are in normal font, the amino acid residues at those positions are in bold, and the corresponding chymotrypsin numbers are in italics. For example, upon alignment of the mature factor VII (SEQ ID NO:3) with mature chymotrypsin (SEQ ID NO:107), the isoleucine (I) at amino acid position 153 in factor VII is given the chymotrypsin numbering of 116. Subsequent amino acids are numbered accordingly. In one example, a glutamic acid (E) at amino acid position 210 of the mature factor VII (SEQ ID NO:3) corresponds to amino acid position E70 based on chymotrypsin numbering. Where a residue exists in a protease, but is not present in chymotrypsin, the amino acid residue is given a letter notation. For example, residues in chymotrypsin that are part of a loop with amino acid 60 based on chymotrypsin numbering, but are inserted in the factor VII sequence compared to chymotrypsin, are referred to for example as K60a, I60b, K60c or N60d. These residues correspond to K197, I198, K199 and N200, respectively, by numbering relative to the mature factor VII sequence (SEQ ID NO:3).

TABLE 1
Chymotryspin numbering of factor VII

| | | | | | | | | | | | | | | |
|---|---|---|---|---|---|---|---|---|---|---|---|---|---|---|
| 153 | 154 | 155 | 156 | 157 | 158 | 159 | 160 | 161 | 162 | 163 | 164 | 165 | 166 | 167 |
| I | V | G | G | K | V | C | P | K | G | E | C | P | W | Q |
| 16 | 17 | 18 | 19 | 20 | 21 | 22 | 23 | 24 | 25 | 26 | 27 | 28 | 29 | 30 |
| 168 | 169 | 170 | 171 | 172 | 173 | 174 | 175 | 176 | 177 | 178 | 179 | 180 | 181 | 182 |
| V | L | L | L | V | N | G | A | Q | L | C | G | G | T | L |
| 31 | 32 | 33 | 34 | 35 | 37 | 38 | 39 | 40 | 41 | 42 | 43 | 44 | 45 | 46 |
| 183 | 184 | 185 | 186 | 187 | 188 | 189 | 190 | 191 | 192 | 193 | 194 | 195 | 196 | 197 |
| I | N | T | I | W | V | V | S | A | A | H | C | F | D | K |
| 47 | 48 | 49 | 50 | 51 | 52 | 53 | 54 | 55 | 56 | 57 | 58 | 59 | 60 | 60A |
| 198 | 199 | 200 | 201 | 202 | 203 | 204 | 205 | 206 | 207 | 208 | 209 | 210 | 211 | 212 |
| I | K | N | W | R | N | L | I | A | V | L | G | E | H | D |
| 60B | 60C | 60D | 61 | 62 | 63 | 64 | 65 | 66 | 67 | 68 | 69 | 70 | 71 | 72 |
| 213 | 214 | 215 | 216 | 217 | 218 | 219 | 220 | 221 | 222 | 223 | 224 | 225 | 226 | 227 |
| L | S | E | H | D | G | D | E | Q | S | R | R | V | A | Q |
| 73 | 74 | 75 | 76 | 77 | 78 | 79 | 80 | 81 | 82 | 83 | 84 | 85 | 86 | 87 |
| 228 | 229 | 230 | 231 | 232 | 233 | 234 | 235 | 236 | 237 | 238 | 239 | 240 | 241 | 242 |
| V | I | I | P | S | T | Y | V | P | G | T | T | N | H | D |
| 88 | 89 | 90 | 91 | 92 | 93 | 94 | 95 | 96 | 97 | 98 | 99 | 100 | 101 | 102 |
| 243 | 244 | 245 | 246 | 247 | 248 | 249 | 250 | 251 | 252 | 253 | 254 | 255 | 256 | 257 |
| I | A | L | L | R | L | H | Q | P | V | V | L | T | D | H |
| 103 | 104 | 105 | 106 | 107 | 108 | 109 | 110 | 111 | 112 | 113 | 114 | 115 | 116 | 117 |
| 258 | 259 | 260 | 261 | 262 | 263 | 264 | 265 | 266 | 267 | 268 | 269 | 270 | 271 | 272 |
| V | V | P | L | C | L | P | E | R | T | F | S | E | R | T |
| 118 | 119 | 120 | 121 | 122 | 123 | 124 | 125 | 126 | 127 | 128 | 129 | 129A | 129B | 129C |
| 273 | 274 | 275 | 276 | 277 | 278 | 279 | 280 | 281 | 282 | 283 | 284 | 285 | 286 | 287 |
| L | A | F | V | R | F | S | L | V | S | G | W | G | Q | L |
| 129D | 129E | 129F | 129G | 134 | 135 | 136 | 137 | 138 | 139 | 140 | 141 | 142 | 143 | 144 |
| 288 | 289 | 290 | 291 | 292 | 293 | 294 | 295 | 296 | 297 | 298 | 299 | 300 | 301 | 302 |
| L | D | R | G | A | T | A | L | E | L | M | V | L | N | V |
| 145 | 146 | 147 | 149 | 150 | 151 | 152 | 153 | 154 | 155 | 156 | 157 | 158 | 159 | 160 |
| 303 | 304 | 305 | 306 | 307 | 308 | 309 | 310 | 311 | 312 | 313 | 314 | 315 | 316 | 317 |
| P | R | L | M | T | Q | D | C | L | Q | Q | S | R | K | V |
| 161 | 162 | 163 | 164 | 165 | 166 | 167 | 168 | 169 | 170 | 170A | 170B | 170C | 170D | 170E |
| 318 | 319 | 320 | 321 | 322 | 323 | 324 | 325 | 326 | 327 | 328 | 329 | 330 | 331 | 332 |
| G | D | S | P | N | I | T | E | Y | M | F | C | A | G | Y |
| 170F | 170G | 170H | 170I | 175 | 176 | 177 | 178 | 179 | 180 | 181 | 182 | 183 | 184A | 184 |
| 333 | 334 | 335 | 336 | 337 | 338 | 339 | 340 | 341 | 342 | 343 | 344 | 345 | 346 | 347 |
| S | D | G | S | K | D | S | C | K | G | D | S | G | G | P |
| 185 | 186 | 187 | 188A | 188 | 189 | 190 | 191 | 192 | 193 | 194 | 195 | 196 | 197 | 198 |
| 348 | 349 | 350 | 351 | 352 | 353 | 354 | 355 | 356 | 357 | 358 | 359 | 360 | 361 | 362 |
| H | A | T | H | Y | R | G | T | W | Y | L | T | G | I | V |
| 199 | 200 | 201 | 202 | 203 | 204 | 205 | 206 | 207 | 208 | 209 | 210 | 211 | 212 | 213 |
| 363 | 364 | 365 | 366 | 367 | 368 | 369 | 370 | 371 | 372 | 373 | 374 | 375 | 376 | 377 |
| S | W | G | Q | G | C | A | T | V | G | H | F | G | V | Y |
| 214 | 215 | 216 | 217 | 219 | 220 | 221A | 221 | 222 | 223 | 224 | 225 | 226 | 227 | 228 |
| 378 | 379 | 380 | 381 | 382 | 383 | 384 | 385 | 386 | 387 | 388 | 389 | 390 | 391 | 392 |
| T | R | V | S | Q | Y | I | E | W | L | Q | K | L | M | R |
| 229 | 230 | 231 | 232 | 233 | 234 | 235 | 236 | 237 | 238 | 239 | 240 | 241 | 242 | 243 |
| 393 | 394 | 395 | 396 | 397 | 398 | 399 | 400 | 401 | 402 | 403 | 404 | 405 | 406 | |
| S | E | P | R | P | G | V | L | L | R | A | P | F | P | |
| 244 | 245 | 246 | 247 | 248 | 249 | 250 | 251 | 252 | 253 | 254 | 255 | 256 | 257 | |

[0092] As used herein, nucleic acids include DNA, RNA and analogs thereof, including peptide nucleic acids (PNA) and mixtures thereof. Nucleic acids can be single or double-stranded. When referring to probes or primers, which are optionally labeled, such as with a detectable label, such as a fluorescent or radiolabel, single-stranded molecules are contemplated. Such molecules are typically of a length such that their target is statistically unique or of low copy number (typically less than 5, generally less than 3) for probing or priming a library. Generally a probe or primer contains at least 14, 16 or 30 contiguous nucleotides of sequence complementary to or identical to a gene of interest. Probes and primers can be 10, 20, 30, 50, 100 or more nucleic acids long.

[0093] As used herein, a peptide refers to a polypeptide that is from 2 to 40 amino acids in length.

[0094] As used herein, the amino acids that occur in the various sequences of amino acids provided herein are identified according to their known, three-letter or one-letter abbreviations (Table 1). The nucleotides which occur in the various nucleic acid fragments are designated with the standard single-letter designations used routinely in the art.

[0095] As used herein, an “amino acid” is an organic compound containing an amino group and a carboxylic acid group. A polypeptide contains two or more amino acids. For purposes herein, amino acids include the twenty naturally-occurring amino acids, non-natural amino acids and amino acid analogs (i.e., amino acids wherein the α-carbon has a side chain).

[0096] In keeping with standard polypeptide nomenclature described in J. Biol. Chem., 243: 3552-3559 (1969), and adopted 37 C.F.R. §§ 1.821-1.822, abbreviations for the amino acid residues are shown in Table 1:

TABLE 2
Table of Correspondence

SYMBOL

| 1-Letter | 3-Letter | AMINO ACID |
|---|---|---|
| Y | Tyr | Tyrosine |
| G | Gly | Glycine |
| F | Phe | Phenylalanine |
| M | Met | Methionine |
| A | Ala | Alanine |
| S | Ser | Serine |
| I | Ile | Isoleucine |
| L | Leu | Leucine |
| T | Thr | Threonine |
| V | Val | Valine |
| P | Pro | proline |
| K | Lys | Lysine |
| H | His | Histidine |
| Q | Gln | Glutamine |
| E | Glu | glutamic acid |
| Z | Glx | Glu and/or Gln |
| W | Trp | Tryptophan |
| R | Arg | Arginine |
| D | Asp | aspartic acid |
| N | Asn | asparagines |
| B | Asx | Asn and/or Asp |
| C | Cys | Cysteine |
| X | Xaa | Unknown or other |

[0097] It should be noted that all amino acid residue sequences represented herein by formulae have a left to right orientation in the conventional direction of amino-terminus to carboxyl-terminus. In addition, the phrase “amino acid residue” is broadly defined to include the amino acids listed in the Table of Correspondence (Table 2) and modified and unusual amino acids, such as those referred to in 37 C.F.R. §§ 1.821-1.822, and incorporated herein by reference. Furthermore, it should be noted that a dash at the beginning or end of an amino acid residue sequence indicates a peptide bond to a further sequence of one or more amino acid residues, to an amino-terminal group such as NH₂ or to a carboxyl-terminal group such as COOH.

[0098] As used herein, a “hydrophobic amino acid” includes any one of the amino acids determined to be hydrophobic using the Eisenberg hydrophobicity consensus scale. Exemplary are the naturally occurring hydrophobic amino acids, such as isoleucine, phenylalanine, valine, leucine, tryptophan, methionine, alanine, glycine, cysteine and tyrosine (Eisenberg et al., (1982) Faraday Symp. Chem. Soc. 17:109-120). Non-naturally-occurring hydrophobic amino acids also are included.

[0099] As used herein, an “acidic amino acid” includes among the naturally-occurring amino acids aspartic acid and glutamic acid residues. Non-naturally-occurring acidic amino acids also are included.

[0100] As used herein, “naturally occurring amino acids” refer to the 20 L-amino acids that occur in polypeptides.

[0101] As used herein, “non-natural amino acid” refers to an organic compound containing an amino group and a carboxylic acid group that is not one of the naturally-occurring amino acids listed in Table 2. Non-naturally occurring amino acids thus include, for example, amino acids or analogs of amino acids other than the 20 naturally-occurring amino acids and include, but are not limited to, the D-isostereomers of amino acids. Exemplary non-natural amino acids are known to those of skill in the art and can be included in a modified factor VII polypeptide.

[0102] As used herein, a DNA construct is a single or double stranded, linear or circular DNA molecule that contains segments of DNA combined and juxtaposed in a manner not found in nature. DNA constructs exist as a result of human manipulation, and include clones and other copies of manipulated molecules.

[0103] As used herein, a DNA segment is a portion of a larger DNA molecule having specified attributes. For example, a DNA segment encoding a specified polypeptide is a portion of a longer DNA molecule, such as a plasmid or plasmid fragment, which, when read from the 5′ to 3′ direction, encodes the sequence of amino acids of the specified polypeptide.

[0104] As used herein, the term polynucleotide means a single- or double-stranded polymer of deoxyribonucleotides or ribonucleotide bases read from the 5′ to the 3′ end. Polynucleotides include RNA and DNA, and can be isolated from natural sources, synthesized in vitro, or prepared from a combination of natural and synthetic molecules. The length of a polynucleotide molecule is given herein in terms of nucleotides (abbreviated “nt”) or base pairs (abbreviated “bp”). The term nucleotides is used for single- and double-stranded molecules where the context permits. When the term is applied to double-stranded molecules it is used to denote overall length and will be understood to be equivalent to the term base pairs. It will be recognized by those skilled in the art that the two strands of a double-stranded polynucleotide can differ slightly in length and that the ends thereof can be staggered; thus all nucleotides within a double-stranded polynucleotide molecule can not be paired. Such unpaired ends will, in general, not exceed 20 nucleotides in length.

[0105] As used herein, “primary sequence” refers to the sequence of amino acid residues in a polypeptide.

[0106] As used herein, “similarity” between two proteins or nucleic acids refers to the relatedness between the sequence of amino acids of the proteins or the nucleotide sequences of the nucleic acids. Similarity can be based on the degree of identity and/or homology of sequences of residues and the residues contained therein. Methods for assessing the degree of similarity between proteins or nucleic acids are known to those of skill in the art. For example, in one method of assessing sequence similarity, two amino acid or nucleotide sequences are aligned in a manner that yields a maximal level of identity between the sequences. “Identity” refers to the extent to which the amino acid or nucleotide sequences are invariant. Alignment of amino acid sequences, and to some extent nucleotide sequences, also can take into account conservative differences and/or frequent substitutions in amino acids (or nucleotides). Conservative differences are those that preserve the physico-chemical properties of the residues involved. Alignments can be global (alignment of the compared sequences over the entire length of the sequences and including all residues) or local (the alignment of a portion of the sequences that includes only the most similar region or regions).

[0107] As used herein, the terms “homology” and “identity” are used interchangeably, but homology for proteins can include conservative amino acid changes. In general to identify corresponding positions the sequences of amino acids are aligned so that the highest order match is obtained (see, e.g.: Computational Molecular Biology, Lesk, A. M., ed., Oxford University Press, New York, 1988; Biocomputing: Informatics and Genome Projects, Smith, D. W., ed., Academic Press, New York, 1993; Computer Analysis of Sequence Data. Part I, Griffin, A. M., and Griffin, H. G., eds., Humana Press, New Jersey, 1994; Sequence Analysis in Molecular Biology, von Heinje, G., Academic Press, 1987; and Sequence Analysis Primer, Gribskov, M. and Devereux, J., eds., M Stockton Press, New York, 1991; Carillo et al. (1988) SIAM J Applied Math 48:1073).

[0108] As use herein, “sequence identity” refers to the number of identical amino acids (or nucleotide bases) in a comparison between a test and a reference polypeptide or polynucleotide. Homologous polypeptides refer to a pre-determined number of identical or homologous amino acid residues. Homology includes conservative amino acid substitutions as well identical residues. Sequence identity can be determined by standard alignment algorithm programs used with default gap penalties established by each supplier. Homologous nucleic acid molecules refer to a pre-determined number of identical or homologous nucleotides. Homology includes substitutions that do not change the encoded amino acid (i.e., “silent substitutions”) as well identical residues. Substantially homologous nucleic acid molecules hybridize typically at moderate stringency or at high stringency all along the length of the nucleic acid or along at least about 70%, 80% or 90% of the full-length nucleic acid molecule of interest. Also contemplated are nucleic acid molecules that contain degenerate codons in place of codons in the hybridizing nucleic acid molecule. (For determination of homology of proteins, conservative amino acids can be aligned as well as identical amino acids; in this case, percentage of identity and percentage homology varies). Whether any two nucleic acid molecules have nucleotide sequences (or any two polypeptides have amino acid sequences) that are at least 80%, 85%, 90%, 95%, 96%, 97%, 98% or 99% “identical” can be determined using known computer algorithms such as the “FAST A” program, using for example, the default parameters as in Pearson et al. Proc. Natl. Acad. Sci. USA 85: 2444 (1988) (other programs include the GCG program package (Devereux, J., et al., Nucleic Acids Research 12(I): 387 (1984)), BLASTP, BLASTN, FASTA (Atschul, S. F., et al., J. Molec. Biol. 215:403 (1990); Guide to Huge Computers, Martin J. Bishop, ed., Academic Press, San Diego (1994), and Carillo et al. SIAM J Applied Math 48: 1073 (1988)). For example, the BLAST function of the National Center for Biotechnology Information database can be used to determine identity. Other commercially or publicly available programs include DNAStar “MegAlign” program (Madison, Wis.) and the University of Wisconsin Genetics Computer Group (UWG) “Gap” program (Madison Wis.)). Percent homology or identity of proteins and/or nucleic acid molecules can be determined, for example, by comparing sequence information using a GAP computer program (e.g., Needleman et al. J. Mol. Biol. 48: 443 (1970), as revised by Smith and Waterman (Adv. Appl. Math. 2: 482 (1981)). Briefly, a GAP program defines similarity as the number of aligned symbols (i.e., nucleotides or amino acids) which are similar, divided by the total number of symbols in the shorter of the two sequences. Default parameters for the GAP program can include: (1) a unary comparison matrix (containing a value of 1 for identities and 0 for non identities) and the weighted comparison matrix of Gribskov et al. Nucl. Acids Res. 14: 6745 (1986), as described by Schwartz and Dayhoff, eds., Atlas of Protein Sequence and Structure, National Biomedical Research Foundation, pp. 353-358 (1979); (2) a penalty of 3.0 for each gap and an additional 0.10 penalty for each symbol in each gap; and (3) no penalty for end gaps.

[0109] Therefore, as used herein, the term “identity” represents a comparison between a test and a reference polypeptide or polynucleotide. In one non-limiting example, “at least 90% identical to” refers to percent identities from 90 to 100% relative to the reference polypeptides. Identity at a level of 90% or more is indicative of the fact that, assuming for exemplification purposes a test and reference polynucleotide length of 100 amino acids are compared, no more than 10% (i.e., 10 out of 100) of amino acids in the test polypeptide differs from that of the reference polypeptides. Similar comparisons can be made between a test and reference polynucleotides. Such differences can be represented as point mutations randomly distributed over the entire length of an amino acid sequence or they can be clustered in one or more locations of varying length up to the maximum allowable, e.g., 10/100 amino acid difference (approximately 90% identity). Differences are defined as nucleic acid or amino acid substitutions, insertions or deletions. At the level of homologies or identities above about 85-90%, the result should be independent of the program and gap parameters set; such high levels of identity can be assessed readily, often without relying on software.

[0110] As used herein, it also is understood that the terms “substantially identical” or “similar” varies with the context as understood by those skilled in the relevant art, but that those of skill can assess such.

[0111] As used herein, an aligned sequence refers to the use of homology (similarity and/or identity) to align corresponding positions in a sequence of nucleotides or amino acids. Typically, two or more sequences that are related by 50% or more identity are aligned. An aligned set of sequences refers to 2 or more sequences that are aligned at corresponding positions and can include aligning sequences derived from RNAs, such as ESTs and other cDNAs, aligned with genomic DNA sequence.

[0112] As used herein, “specifically hybridizes” refers to annealing, by complementary base-pairing, of a nucleic acid molecule (e.g. an oligonucleotide) to a target nucleic acid molecule. Those of skill in the art are familiar with in vitro and in vivo parameters that affect specific hybridization, such as length and composition of the particular molecule. Parameters particularly relevant to in vitro hybridization further include annealing and washing temperature, buffer composition and salt concentration. Exemplary washing conditions for removing non-specifically bound nucleic acid molecules at high stringency are 0.1×SSPE, 0.1% SDS, 65° C., and at medium stringency are 0.2×SSPE, 0.1% SDS, 50° C. Equivalent stringency conditions are known in the art. The skilled person can readily adjust these parameters to achieve specific hybridization of a nucleic acid molecule to a target nucleic acid molecule appropriate for a particular application.

[0113] As used herein, isolated or purified polypeptide or protein or biologically-active portion thereof is substantially free of cellular material or other contaminating proteins from the cell of tissue from which the protein is derived, or substantially free from chemical precursors or other chemicals when chemically synthesized. Preparations can be determined to be substantially free if they appear free of readily detectable impurities as determined by standard methods of analysis, such as thin layer chromatography (TLC), gel electrophoresis and high performance liquid chromatography (HPLC), used by those of skill in the art to assess such purity, or sufficiently pure such that further purification would not detectably alter the physical and chemical properties, such as proteolytic and biological activities, of the substance. Methods for purification of the compounds to produce substantially chemically pure compounds are known to those of skill in the art. A substantially chemically pure compound, however, can be a mixture of stereoisomers. In such instances, further purification might increase the specific activity of the compound.

[0114] The term substantially free of cellular material includes preparations of proteins in which the protein is separated from cellular components of the cells from which it is isolated or recombinantly-produced. In one embodiment, the term substantially free of cellular material includes preparations of protease proteins having less that about 30% (by dry weight) of non-protease proteins (also referred to herein as a contaminating protein), generally less than about 20% of non-protease proteins or 10% of non-protease proteins or less that about 5% of non-protease proteins. When the protease protein or active portion thereof is recombinantly produced, it also is substantially free of culture medium, i.e., culture medium represents less than, about, or equal to 20%, 10% or 5% of the volume of the protease protein preparation.

[0115] As used herein, the term substantially free of chemical precursors or other chemicals includes preparations of protease proteins in which the protein is separated from chemical precursors or other chemicals that are involved in the synthesis of the protein. The term includes preparations of protease proteins having less than about 30% (by dry weight), 20%, 10%, 5% or less of chemical precursors or non-protease chemicals or components.

[0116] As used herein, production by recombinant methods by using recombinant DNA methods refers to the use of the well known methods of molecular biology for expressing proteins encoded by cloned DNA.

[0117] As used herein, vector (or plasmid) refers to discrete elements that are used to introduce heterologous nucleic acid into cells for either expression or replication thereof. The vectors typically remain episomal, but can be designed to effect integration of a gene or portion thereof into a chromosome of the genome. Also contemplated are vectors that are artificial chromosomes, such as bacterial artificial chromosomes, yeast artificial chromosomes and mammalian artificial chromosomes. Selection and use of such vehicles are well known to those of skill in the art.

[0118] As used herein, expression refers to the process by which nucleic acid is transcribed into mRNA and translated into peptides, polypeptides, or proteins. If the nucleic acid is derived from genomic DNA, expression can, if an appropriate eukaryotic host cell or organism is selected, include processing, such as splicing of the mRNA.

[0119] As used herein, an expression vector includes vectors capable of expressing DNA that is operatively linked with regulatory sequences, such as promoter regions, that are capable of effecting expression of such DNA fragments. Such additional segments can include promoter and terminator sequences, and optionally can include one or more origins of replication, one or more selectable markers, an enhancer, a polyadenylation signal, and the like. Expression vectors are generally derived from plasmid or viral DNA, or can contain elements of both. Thus, an expression vector refers to a recombinant DNA or RNA construct, such as a plasmid, a phage, recombinant virus or other vector that, upon introduction into an appropriate host cell, results in expression of the cloned DNA. Appropriate expression vectors are well known to those of skill in the art and include those that are replicable in eukaryotic cells and/or prokaryotic cells and those that remain episomal or those which integrate into the host cell genome.

[0120] As used herein, vector also includes “virus vectors” or “viral vectors.” Viral vectors are engineered viruses that are operatively linked to exogenous genes to transfer (as vehicles or shuttles) the exogenous genes into cells.

[0121] As used herein, an adenovirus refers to any of a group of DNA-containing viruses that cause conjunctivitis and upper respiratory tract infections in humans.

[0122] As used herein, naked DNA refers to histone-free DNA that can be used for vaccines and gene therapy. Naked DNA is the genetic material that is passed from cell to cell during a gene transfer processed called transformation or transfection. In transformation or transfection, purified or naked DNA that is taken up by the recipient cell will give the recipient cell a new characteristic or phenotype.

[0123] As used herein, operably or operatively linked when referring to DNA segments means that the segments are arranged so that they function in concert for their intended purposes, e.g., transcription initiates in the promoter and proceeds through the coding segment to the terminator.

[0124] As used herein, an agent that modulates the activity of a protein or expression of a gene or nucleic acid either decreases or increases or otherwise alters the activity of the protein or, in some manner, up- or down-regulates or otherwise alters expression of the nucleic acid in a cell.

[0125] As used herein, a “chimeric protein” or “fusion protein” refers to a polypeptide operatively-linked to a different polypeptide. A chimeric or fusion protein provided herein can include one or more FVII polypeptides, or a portion thereof, and one or more other polypeptides for any one or more of a transcriptional/translational control signals, signal sequences, a tag for localization, a tag for purification, part of a domain of an immunoglobulin G, and/or a targeting agent. A chimeric FVII polypeptide also includes those having their endogenous domains or regions of the polypeptide exchanged with another polypeptide. These chimeric or fusion proteins include those produced by recombinant means as fusion proteins, those produced by chemical means, such as by chemical coupling, through, for example, coupling to sulfhydryl groups, and those produced by any other method whereby at least one polypeptide (i.e. FVII), or a portion thereof, is linked, directly or indirectly via linker(s) to another polypeptide.

[0126] As used herein, operatively-linked when referring to a fusion protein refers to a protease polypeptide and a non-protease polypeptide that are fused in-frame to one another. The non-protease polypeptide can be fused to the N-terminus or C-terminus of the protease polypeptide.

[0127] As used herein, a targeting agent, is any moiety, such as a protein or effective portion thereof, that provides specific binding to a cell surface molecule, such a cell surface receptor, which in some instances can internalize a bound conjugate or portion thereof. A targeting agent also can be one that promotes or facilitates, for example, affinity isolation or purification of the conjugate; attachment of the conjugate to a surface; or detection of the conjugate or complexes containing the conjugate.

[0128] As used herein, derivative or analog of a molecule refers to a portion derived from or a modified version of the molecule.

[0129] As used herein, “disease or disorder” refers to a pathological condition in an organism resulting from cause or condition including, but not limited to, infections, acquired conditions, genetic conditions, and characterized by identifiable symptoms. Diseases and disorders of interest herein are those involving coagulation, including those mediated by coagulation proteins and those in which coagulation proteins play a role in the etiology or pathology. Diseases and disorders also include those that are caused by the absence of a protein such as in hemophilia, and of particular interest herein are those disorders where coagulation does not occur due to a deficiency of defect in a coagulation protein.

[0130] As used herein, “procoagulant” refers to any substance that promotes blood coagulation.

[0131] As used herein, “anticoagulant” refers to any substance that inhibits blood coagulation

[0132] As used herein, “hemophilia” refers to a bleeding disorder caused by a deficiency in a blood clotting factors. Hemophilia can be the result, for example, of absence, reduced expression, or reduced function of a clotting factor. The most common type of hemophilia is hemophilia A, which results from a deficiency in factor VIII. The second most common type of hemophilia is hemophilia B, which results from a deficiency in factor IX. Hemophilia C, also called FXI deficiency, is a milder and less common form of hemophilia.

[0133] As used herein, “congenital hemophilia” refers to types of hemophilia that are inherited. Congenital hemophilia results from mutation, deletion, insertion, or other modification of a clotting factor gene in which the production of the clotting factor is absent, reduced, or non-functional. For example, hereditary mutations in clotting factor genes, such as factor VIII and factor IX result in the congenital hemophilias, Hemophilia A and B, respectively.

[0134] As used herein, “acquired hemophilia” refers to a type of hemophilia that develops in adulthood from the production of autoantibodies that inactivate FVIII.

[0135] As used herein, “bleeding disorder” refers to a condition in which the subject has a decreased ability to control bleeding. Bleeding disorders can be inherited or acquired, and can result from, for example, defects or deficiencies in the coagulation pathway, defects or deficiencies in platelet activity, or vascular defects.

[0136] As used herein, “acquired bleeding disorder” refers to bleeding disorders that results from clotting deficiencies caused by conditions such as liver disease, vitamin K deficiency, or coumadin (warfarin) or other anti-coagulant therapy.

[0137] As used herein, “treating” a subject having a disease or condition means that a polypeptide, composition or other product provided herein is administered to the subject.

[0138] As used herein, a therapeutic agent, therapeutic regimen, radioprotectant, or chemotherapeutic mean conventional drugs and drug therapies, including vaccines, which are known to those skilled in the art. Radiotherapeutic agents are well known in the art.

[0139] As used herein, treatment means any manner in which the symptoms of a condition, disorder or disease are ameliorated or otherwise beneficially altered. Hence treatment encompasses prophylaxis, therapy and/or cure. Treatment also encompasses any pharmaceutical use of the compositions herein. Treatment also encompasses any pharmaceutical use of a modified FVII and compositions provided herein.

[0140] As used herein, amelioration of the symptoms of a particular disease or disorder by a treatment, such as by administration of a pharmaceutical composition or other therapeutic, refers to any lessening, whether permanent or temporary, lasting or transient, of the symptoms that can be attributed to or associated with administration of the composition or therapeutic.

[0141] As used herein, prevention or prophylaxis refers to methods in which the risk of developing disease or condition is reduced. Prophylaxis includes reduction in the risk of developing a disease or condition and/or a prevention of worsening of symptoms or progression of a disease or reduction in the risk of worsening of symptoms or progression of a disease.

[0142] As used herein an effective amount of a compound or composition for treating a particular disease is an amount that is sufficient to ameliorate, or in some manner reduce the symptoms associated with the disease. Such amount can be administered as a single dosage or can be administered according to a regimen, whereby it is effective. The amount can cure the disease but, typically, is administered in order to ameliorate the symptoms of the disease. Typically, repeated administration is required to achieve a desired amelioration of symptoms.

[0143] As used herein, “therapeutically effective amount” or “therapeutically effective dose” refers to an agent, compound, material, or composition containing a compound that is at least sufficient to produce a therapeutic effect. An effective amount is the quantity of a therapeutic agent necessary for preventing, curing, ameliorating, arresting or partially arresting a symptom of a disease or disorder.

[0144] As used herein, “patient” or “subject” to be treated includes humans and or non-human animals, including mammals. Mammals include primates, such as humans, chimpanzees, gorillas and monkeys; domesticated animals, such as dogs, horses, cats, pigs, goats, cows; and rodents such as mice, rats, hamsters and gerbils.

[0145] As used herein, a combination refers to any association between two or among more items. The association can be spatial or refer to the use of the two or more items for a common purpose.

[0146] As used herein, a composition refers to any mixture of two or more products or compounds (e.g., agents, modulators, regulators, etc.). It can be a solution, a suspension, liquid, powder, a paste, aqueous or non-aqueous formulations or any combination thereof.

[0147] As used herein, an “article of manufacture” is a product that is made and sold. As used throughout this application, the term is intended to encompass modified protease polypeptides and nucleic acids contained in articles of packaging.

[0148] As used herein, fluid refers to any composition that can flow. Fluids thus encompass compositions that are in the form of semi-solids, pastes, solutions, aqueous mixtures, gels, lotions, creams and other such compositions.

[0149] As used herein, a “kit” refers to a packaged combination, optionally including reagents and other products and/or components for practicing methods using the elements of the combination. For example, kits containing a modified protease polypeptide or nucleic acid molecule provided herein and another item for a purpose including, but not limited to, administration, diagnosis, and assessment of a biological activity or property are provided. Kits optionally include instructions for use.

[0150] As used herein, antibody includes antibody fragments, such as Fab fragments, which are composed of a light chain and the variable region of a heavy chain.

[0151] As used herein, a receptor refers to a molecule that has an affinity for a particular ligand. Receptors can be naturally-occurring or synthetic molecules. Receptors also can be referred to in the art as anti-ligands.

[0152] As used herein, animal includes any animal, such as, but not limited to; primates including humans, gorillas and monkeys; rodents, such as mice and rats; fowl, such as chickens; ruminants, such as goats, cows, deer, sheep; ovine, such as pigs and other animals. Non-human animals exclude humans as the contemplated animal. The proteases provided herein are from any source, animal, plant, prokaryotic and fungal.

[0153] As used herein, gene therapy involves the transfer of heterologous nucleic acid, such as DNA, into certain cells, target cells, of a mammal, particularly a human, with a disorder or condition for which such therapy is sought. The nucleic acid, such as DNA, is introduced into the selected target cells, such as directly or in a vector or other delivery vehicle, in a manner such that the heterologous nucleic acid, such as DNA, is expressed and a therapeutic product encoded thereby is produced. Alternatively, the heterologous nucleic acid, such as DNA, can in some manner mediate expression of DNA that encodes the therapeutic product, or it can encode a product, such as a peptide or RNA that in some manner mediates, directly or indirectly, expression of a therapeutic product. Genetic therapy also can be used to deliver nucleic acid encoding a gene product that replaces a defective gene or supplements a gene product produced by the mammal or the cell in which it is introduced. The introduced nucleic acid can encode a therapeutic compound, such as a protease or modified protease, that is not normally produced in the mammalian host or that is not produced in therapeutically effective amounts or at a therapeutically useful time. The heterologous nucleic acid, such as DNA, encoding the therapeutic product can be modified prior to introduction into the cells of the afflicted host in order to enhance or otherwise alter the product or expression thereof. Genetic therapy also can involve delivery of an inhibitor or repressor or other modulator of gene expression.

[0154] As used herein, heterologous nucleic acid is nucleic acid that is not normally produced in vivo by the cell in which it is expressed or that is produced by the cell but is at a different locus or expressed differently or that mediates or encodes mediators that alter expression of endogenous nucleic acid, such as DNA, by affecting transcription, translation, or other regulatable biochemical processes. Heterologous nucleic acid is generally not endogenous to the cell into which it is introduced, but has been obtained from another cell or prepared synthetically. Heterologous nucleic acid can be endogenous, but is nucleic acid that is expressed from a different locus or altered in its expression. Generally, although not necessarily, such nucleic acid encodes RNA and proteins that are not normally produced by the cell or in the same way in the cell in which it is expressed. Heterologous nucleic acid, such as DNA, also can be referred to as foreign nucleic acid, such as DNA. Thus, heterologous nucleic acid or foreign nucleic acid includes a nucleic acid molecule not present in the exact orientation or position as the counterpart nucleic acid molecule, such as DNA, is found in a genome. It also can refer to a nucleic acid molecule from another organism or species (i.e., exogenous).

[0155] Any nucleic acid, such as DNA, that one of skill in the art would recognize or consider as heterologous or foreign to the cell in which the nucleic acid is expressed is herein encompassed by heterologous nucleic acid; heterologous nucleic acid includes exogenously added nucleic acid that also is expressed endogenously. Examples of heterologous nucleic acid include, but are not limited to, nucleic acid that encodes traceable marker proteins, such as a protein that confers drug resistance, nucleic acid that encodes therapeutically effective substances, such as anti-cancer agents, enzymes and hormones, and nucleic acid, such as DNA, that encodes other types of proteins, such as antibodies. Antibodies that are encoded by heterologous nucleic acid can be secreted or expressed on the surface of the cell in which the heterologous nucleic acid has been introduced.

[0156] As used herein, a therapeutically effective product for gene therapy is a product that is encoded by heterologous nucleic acid, typically DNA, that, upon introduction of the nucleic acid into a host, a product is expressed that ameliorates or eliminates the symptoms, manifestations of an inherited or acquired disease or that cures the disease. Also included are biologically active nucleic acid molecules, such as RNAi and antisense.

[0157] As used herein, recitation that a polypeptide “consists essentially” of a recited sequence of amino acids means that only the recited portion, or a fragment thereof, of the full-length polypeptide is present. The polypeptide can optionally, and generally will, include additional amino acids from another source or can be inserted into another polypeptide

[0158] As used here, the singular forms “a,” “an” and “the” include plural referents unless the context clearly dictates otherwise. Thus, for example, reference to compound, comprising “an extracellular domain” includes compounds with one or a plurality of extracellular domains.

[0159] As used herein, ranges and amounts can be expressed as “about” a particular value or range. About also includes the exact amount. Hence “about 5 bases” means “about 5 bases” and also “5 bases.’

[0160] As used herein, “optional” or “optionally” means that the subsequently described event or circumstance does or does not occur, and that the description includes instances where said event or circumstance occurs and instances where it does not. For example, an optionally substituted group means that the group is unsubstituted or is substituted.

[0161] As used herein, the abbreviations for any protective groups, amino acids and other compounds, are, unless indicated otherwise, in accord with their common usage, recognized abbreviations, or the IUPAC-IUB Commission on Biochemical Nomenclature (see, (1972) Biochem. 11:1726).

### B. Hemostasis Overview

[0162] Provided herein are modified Factor VII (FVII) polypeptides. Such FVII polypeptides are designed to have increased coagulant activity. Accordingly, these polypeptides have a variety of uses and applications, for example, as therapeutics for modulating hemostasis, and other related biological processes. To appreciate the modifications provided herein and the use of such modified FVII molecules, an understanding of the haemostatic system and the blood coagulation cascade is advantageous. The following discussion provides such background, prefatory to a discussion of factor VII, and modifications thereof.

[0163] Hemostasis is the physiological mechanism that stems the bleeding that results from injury to the vasculature. Normal hemostasis depends on cellular components and soluble plasma proteins, and involves a series of signaling events that ultimately leads to the formation of a blood clot. Coagulation is quickly initiated after an injury occurs to the blood vessel and endothelial cells are damaged. In the primary phase of coagulation, platelets are activated to form a haemostatic plug at the site of injury. Secondary hemostasis follows involving plasma coagulation factors, which act in a proteolytic cascade resulting in the formation of fibrin strands which strengthen the platelet plug.

[0164] Upon vessel injury, the blood flow to the immediate injured area is restricted by vascular constriction allowing platelets to adhere to the newly-exposed fibrillar collagen on the subendothelial connective tissue. This adhesion is dependent upon the von Willebrand factor (vWF), which binds to the endothelium within three seconds of injury, thereby facilitating platelet adhesion and aggregation. Activation of the aggregated platelets results in the secretion of a variety of factors, including ADP, ATP, thromboxane and serotonin. Adhesion molecules, fibrinogen, vWF, thrombospondin and fibronectin also are released. Such secretion promotes additional adhesion and aggregation of platelets, increased platelet activation and blood vessel constriction, and exposure of anionic phospholipids on the platelet surface that serve as platforms for the assembly of blood coagulation enzyme complexes. The platelets change shape leading to pseudopodia formation, which further facilitates aggregation to other platelets resulting in a loose platelet plug.

[0165] A clotting cascade of peptidases (the coagulation cascade) is simultaneously initiated. The coagulation cascade involves a series of activation events involving proteolytic cleavage. In such a cascade, an inactive protein of a serine protease (also called a zymogen) is converted to an active protease by cleavage of one or more peptide bonds, which then serves as the activating protease for the next zymogen molecule in the cascade, ultimately resulting in clot formation by the cross-linking of fibrin. For example, the cascade generates activated molecules such as thrombin (from cleavage of prothrombin), which further activates platelets, and also generates fibrin from cleavage of fibrinogen. Fibrin then forms a cross-linked polymer around the platelet plug to stabilize the clot. Upon repair of the injury, fibrin is digested by the fibrinolytic system, the major components of which are plasminogen and tissue-type plasminogen activator (tPA). Both of these proteins are incorporated into polymerizing fibrin, where they interact to generate plasmin, which, in turn, acts on fibrin to dissolve the preformed clot. During clot formation, coagulation factor inhibitors also circulate through the blood to prevent clot formation beyond the injury site.

[0166] The interaction of the system, from injury to clot formation and subsequent fibrinolysis, is described below.

[0167] 1. Platelet Adhesion and Aggregation

[0168] The clotting of blood is actively circumvented under normal conditions. The vascular endothelium supports vasodilation, inhibits platelet adhesion and activation, suppresses coagulation, enhances fibrin cleavage and is anti-inflammatory in character. Vascular endothelial cells secrete molecules such as nitrous oxide (NO) and prostacyclin, which inhibit platelet aggregation and dilate blood vessels. Release of these molecules activates soluble guanylate cyclases (sGC) and cGMP-dependent protein kinase I (cGKI) and increases cyclic guanosine monophosphate (cGMP) levels, which cause relaxation of the smooth muscle in the vessel wall. Furthermore, endothelial cells express cell-surface ADPases, such as CD39, which control platelet activation and aggregation by converting ADP released from platelets into adenine nucleotide platelet inhibitors. The endothelium also plays an important role in the regulation of the enzymes in the fibrinolytic cascade. Endothelial cells directly promote the generation of plasmin through the expression of receptors of plasminogen (annexin II) and urokinase, as well as the secretion of tissue-type and urokinase plasminogen activators, all of which promote clot clearance. In a final layer of prothrombotic regulation, endothelial cells play an active role in inhibiting the coagulation cascade by producing heparan sulfate, which increases the kinetics of antithrombin III inhibition of thrombin and other coagulation factors.

[0169] Under acute vascular trauma, however, vasoconstrictor mechanisms predominate and the endothelium becomes prothrombotic, procoagulatory and proinflammatory in nature. This is achieved by a reduction of endothelial dilating agents: adenosine, NO and prostacyclin; and the direct action of ADP, serotonin and thromboxane on vascular smooth muscle cells to elicit their contraction (Becker, Heindl et al. 2000). The chief trigger for the change in endothelial function that leads to the formation of haemostatic thrombus is the loss of the endothelial cell barrier between blood and extracellular matrix (ECM) components (Ruggeri (2002) Nat Med 8:1227-1234). Circulating platelets identify and discriminate areas of endothelial lesions and adhere to the exposed sub endothelium. Their interaction with the various thrombogenic substrates and locally-generated or released agonists results in platelet activation. This process is described as possessing two stages, 1) adhesion: the initial tethering to a surface, and 2) aggregation: the platelet-platelet cohesion (Savage et al. (2001) Curr Opin Hematol 8:270-276).

[0170] Platelet adhesion is initiated when the circulating platelets bind to exposed collagen through interaction with collagen binding proteins on the cell surface, and through interaction with vWF, also present on the endothelium. vWF protein is a multimeric structure of variable size, secreted in two directions by the endothelium; basolaterally and into the bloodstream. vWF also binds to factor VIII, which is important in the stabilization of factor VIII and its survival in the circulation.

[0171] Platelet adhesion and subsequent activation is achieved when vWF binds via its A1 domain to GPIb (part of the platelet glycoprotein receptor complex GPIb-IX-V). The interaction between vWF and GPIb is regulated by shear force such that an increase in the shear stress results in a corresponding increase in the affinity of vWF for GPIb. Integrin α1β2, also known on leukocytes as VLA-2, is the major collagen receptor on platelets, and engagement through this receptor generates the intracellular signals that contribute to platelet activation. Binding through α1β2 facilitates the engagement of the lower-affinity collagen receptor, GP VI. This is part of the immunoglobulin superfamily and is the receptor that generates the most potent intracellular signals for platelet activation. Platelet activation results in the release of adenosine diphosphate (ADP), which is converted to thromboxane A2.

[0172] Platelet activation also results in the surface expression of platelet glycoprotein IIb-IIIa (GP IIb-IIIa) receptors, GP IIb-IIIa receptors allow the adherence of platelets to each other (i.e. aggregation) by virtue of fibrinogen molecules linking the platelets through these receptors. This results in the formation of a platelet plug at the site of injury to help prevent further blood loss, while the damaged vascular tissue releases factors that initiate the coagulation cascade and the formation of a stabilizing fibrin mesh around the platelet plug.

[0173] 2. Coagulation Cascade

[0174] The coagulation pathway is a proteolytic pathway where each enzyme is present in the plasma as a zymogen, or inactive form. Cleavage of the zymogen is regulated to release the active form from the precursor molecule. Cofactors of the activated proteases, such as the glycoproteins FVIII and FV, also are activated in the cascade reaction and play a role in clot formation. The pathway functions as a series of positive and negative feedback loops which control the activation process, where the ultimate goal is to produce thrombin, which can then convert soluble fibrinogen into fibrin to form a clot. The factors in the coagulation are typically given a roman numeral number, with a lower case “a” appended to indicate an activated form. Table 3 below sets forth an exemplary list of the factors, including their common name, and their role in the coagulation cascade. Generally, these proteins participate in blood coagulation through one or more of the intrinsic, extrinsic or common pathway of coagulation (see FIG. 1). As discussed below, these pathways are interconnected, and blood coagulation is believed to occur through a cell-based model of activation with Factor VII (FVII) being the primary initiator of coagulation.

TABLE 3
Coagulation Factors

| Factor | Common Name | Pathway | Characteristic |
|---|---|---|---|
| I | Fibrinogen | Both | — |
| II | Prothrombin | Both | Contains N-terminal |
| | | | Gla domain |
| III | Tissue Factor | Extrinsic | — |
| IV | Calcium | Both | — |
| V | Proaccelerin, labile factor, | Both | Protein cofactor |
| | Accelerator globulin | | |
| VI | Accelerin | — | (Redundant to |
| (Va) | | | factor V) |
| VII | Proconvertin, serum | Extrinsic | Endopeptidase with |
| | prothrombin conversion | | Gla domain |
| | accelerator (SPCA) | | |
| | cothromboplastin | | |
| VIII | Antihemophiliac factor A, | Intrinsic | Protein cofactor |
| | antihemophiliac globulin | | |
| | (AHG) | | |
| IX | Christmas factor, | Intrinsic | Endopeptidase with |
| | antihemophiliac factor B, | | Gla domain |
| | plasma thromboplastin | | |
| | component (PTC) | | |
| X | Stuart-prower factor | Both | Endopeptidase with |
| | | | Gla domain |
| XI | Plasma thromboplastin | Intrinsic | Endopeptidase |
| | antecedent (PTA) | | |
| XII | Hageman factor | Intrinsic | Endopeptidase |
| XIII | Protransglutamidase, fibrin | Both | Transpeptidase |
| | stabilizing factor (FSF), | | |
| | fibrinoligase | | |

*Table adapted from M. W. King (2006) at med.unibs.it/~marchesi/blood.html

[0175] The generation of thrombin has historically been divided into three pathways, the intrinsic (suggesting that all components of the pathway are intrinsic to plasma) and extrinsic (suggesting that one or more components of the pathway are extrinsic to plasma) pathways that provide alternative routes for the generation of activated factor X (FXa), and the final common pathway which results in thrombin formation (FIG. 1). These pathways participate together in an interconnected and interdependent process to effect coagulation. A cell-based model of coagulation was developed that describes these pathways (FIG. 2) (Hoffman et al. (2001) Thromb Haemost 85:958-965). In this model, the “extrinsic” and “intrinsic” pathways are effected on different cell surfaces, the tissue factor (TF)-bearing cell and the platelet, respectively. The process of coagulation is separated into distinct phases, initiation, amplification and propagation, during which the extrinsic and intrinsic pathways function at various stages to produce the large burst of thrombin required to convert sufficient quantities of fibrinogen to fibrin for clot formation.

[0176] a. Initiation

[0177] FVII is considered to be the coagulation factor responsible for initiating the coagulation cascade, which initiation is dependent on its interaction with TF. TF is a transmembrane glycoprotein expressed by a variety of cells such as smooth muscle cells, fibroblasts, monocytes, lymphocytes, granulocytes, platelets and endothelial cells. Myeloid cells and endothelial cells only express TF when they are stimulated, such as by proinflammatory cytokines. Smooth muscle cells and fibroblasts, however, express TF constitutively. Accordingly, once these cells come in contact with the bloodstream following tissue injury, the coagulation cascade is rapidly initiated by the binding of TF with factor VII or FVIIa in the plasma.

[0178] As discussed below, the majority of FVII in the blood is in the zymogen form with a small amount, approximately 1%, present as FVIIa. In the absence of TF binding, however, even FVIIa has zymogen-like characteristics and does not display significant activity until it is complexed with TF. Thus, plasma FVII requires activation by proteolytic cleavage, and additional conformational change through interaction with TF, for full activity. A range of proteases, including factors IXa, Xa, XIIa, and thrombin, have been shown to be capable of FVII cleavage in vitro, a process which is accelerated in the presence of TF. FVIIa itself also can activate FVII in the presence of TF, a process termed autoactivation. The small amounts of FVIIa in the blood are likely due to activation by FXa and/or FIXa (Wildgoose et al. (1992) Blood 80:25-28, and Butenas et al. (1996) Biochemistry 35:1904-1910). TF/FVIIa complexes can thus be formed by the direct binding of FVIIa to TF, or by the binding of FVII to TF and then the subsequent activation of FVII to FVIIa by a plasma protease, such as FXa, FIXa, FXIIa, or FVIIa itself. The TF/FVIIa complex remains anchored to the TF-bearing cell where it activates small amounts FX into FXa in what is known as the “extrinsic pathway” of coagulation.

[0179] The TF/FVIIa complex also cleaves small amounts of FIX into FIXa. FXa associates with its cofactor FVa to also form a complex on the TF-bearing cell that can then covert prothrombin to thrombin. The small amount of thrombin produced is, however, inadequate to support the required fibrin formation for complete clotting. Additionally, any active FXa and FIXa are inhibited in the circulation by antithrombin III (AT-III) and other serpins, which are discussed in more detail below. This would normally prevent clot formation in the circulation. In the presence of injury, however, damage to the vasculature results in platelet aggregation and activation at this site of thrombin formation, thereby allowing for amplification of the coagulation signal.

[0180] b. Amplification

[0181] Amplification takes place when thrombin binds to and activates the platelets. The activated platelets release FV from their alpha granules, which is activated by thrombin to FVa. Thrombin also releases and activates FVIII from the FVIII/vWF complex on the platelet membrane, and cleaves FXI into FXIa. These reactions generate activated platelets that have FVa, FVIIIa and FIXa on their surface, which set the stage for a large burst of thrombin generation during the propagation stage.

[0182] C. Propagation

[0183] Propagation of coagulation occurs on the surface of large numbers of platelets at the site of injury. As described above, the activated platelets have FXIa, FVIIIa and FVa on their surface. It is here that the extrinsic pathway is effected. FXIa activates FIX to FIXa, which can then bind with FVIIIa. This process, in addition to the small amounts of FIXa that is generated by cleavage of FIX by the TF/FVIIa complex on the TF-bearing cell, generates large numbers of FXIa/FVIIIa complexes which in turn can activate significant amounts of FX to FXa. The FXa molecules bind to FVa to generate the prothrombinase complexes that activate prothrombin to thrombin. Thrombin acts in a positive feedback loop to activate even more platelets and again initiates the processes described for the amplification phase.

[0184] Very shortly, there are sufficient numbers of activated platelets with the appropriate complexes to generate the burst of thrombin that is large enough to generate sufficient amounts of fibrin from fibrinogen to form a hemostatic fibrin clot. Fibrinogen is a dimer soluble in plasma which, when cleaved by thrombin, releases fibrinopeptide A and fibrinopeptide B. Fibrinopeptide B is then cleaved by thrombin, and the fibrin monomers formed by this second proteolytic cleavage spontaneously forms an insoluble gel. The polymerized fibrin is held together by noncovalent and electrostatic forces and is stabilized by the transamidating enzyme factor XIIIa (FXIIIa), produced by the cleavage of FXIII by thrombin. Thrombin also activates TAFI, which inhibits fibrinolysis by reducing plasmin generation at the clot surface. Additionally, thrombin itself is incorporated into the structure of the clot for further stabilization. These insoluble fibrin aggregates (clots), together with aggregated platelets (thrombi), block the damaged blood vessel and prevent further bleeding.

[0185] 3. Regulation of Coagulation

[0186] During coagulation, the cascade is regulated by constitutive and stimulated processes to inhibit further clot formation. There are several reasons for such regulatory mechanisms. First, regulation is required to limit ischemia of tissues by fibrin clot formation. Second, regulation prevents widespread thrombosis by localizing the clot formation only to the site of tissue injury.

[0187] Regulation is achieved by the cations of several inhibitory molecules. For example, antithrombin III (AT-III) and tissue factor pathway inhibitor (TFPI) work constitutively to inhibit factors in the coagulation cascade. AT-III inhibits thrombin, FIXa, and FXa, whereas TFPI inhibits FXa and FVIIa/TF complex. An additional factor, Protein C, which is stimulated via platelet activation, regulates coagulation by proteolytic cleavage and inactivation of FVa and FVIIIa. Protein S enhances the activity of Protein C. Further, another factor which contributes to coagulation inhibition is the integral membrane protein thrombomodulin, which is produced by vascular endothelial cells and serves as a receptor for thrombin. Binding of thrombin to thrombomodulin inhibits thrombin procoagulant activities and also contributes to protein C activation.

[0188] Fibrinolysis, the breakdown of the fibrin clot, also provides a mechanism for regulating coagulation. The crosslinked fibrin multimers in a clot are broken down to soluble polypeptides by plasmin, a serine protease. Plasmin can be generated from its inactive precursor plasminogen and recruited to the site of a fibrin clot in two ways: by interaction with tissue plasminogen activator (tPA) at the surface of a fibrin clot, and by interaction with urokinase plasminogen activator (uPA) at a cell surface. The first mechanism appears to be the major one responsible for the dissolution of clots within blood vessels. The second, although capable of mediating clot dissolution, can play a major role in tissue remodeling, cell migration, and inflammation.

[0189] Clot dissolution also is regulated in two ways. First, efficient plasmin activation and fibrinolysis occur only in complexes formed at the clot surface or on a cell membrane, while proteins free in the blood are inefficient catalysts and are rapidly inactivated. Second, plasminogen activators and plasmin are inactivated by molecules such as plasminogen activator inhibitor type 1 (PAI-1) and PAI-2 which act on the plasminogen activators, and α2-antiplasmin and α2-macroglobulin that inactivate plasmin. Under normal circumstances, the timely balance between coagulation and fibrinolysis results in the efficient formation and clearing of clots following vascular injury, while simultaneously preventing unwanted thrombotic or bleeding episodes.

[0190] A summary of exemplary coagulation factors, cofactors and regulatory proteins, and their activities, are set forth in Table 4 below.

TABLE 4
Coagulation Factor Zymogens and Cofactors

| | |
|---|---|
| Name of Factor | Activity |

Zymogens of Serine Proteases

| | |
|---|---|
| Factor XII | Binds exposed collagen at site of vessel |
| | wall injury, activated by high-MW |
| | kininogen and kallikrein |
| Factor XI | Activated by factor XIIa |
| Factor IX | Activated by factor XIa + Ca²⁺ |
| Factor VII | Activated by thrombin, factor X, factor |
| | IXa or factor XIIa + Ca²⁺, or |
| | autoactivation |
| Factor X | Activated on platelet surface by tenase |
| | complex (FIXa/FVIIIa); |
| | Also activated by factor VIIa + tissue |
| | factor + Ca²⁺, or factor VIIa + Ca²⁺ |
| Factor II | Activated on platelet surface by |
| | prothrombinase complex (FXa/FVa) |

Cofactors

| | |
|---|---|
| Factor VIII | Activated by thrombin; factor VIIIa acts |
| | as cofactor for factor IXa in activation of |
| | factor X |
| Factor V | Activated by thrombin; factor Va acts as |
| | cofactor for factor Xa in activation of |
| | prothrombin |
| Factor III (Tissue factor) | Acts as cofactor for factor VIIa |

Fibrinogen

| | |
|---|---|
| Factor I (Fibrinogen) | Cleaved by thrombin to form fibrin |

Transglutaminase

| | |
|---|---|
| Factor XIII | Activated by thrombin + Ca²⁺; promotes |
| | covalent cross-linking of fibrin |

Regulatory and other proteins

| | |
|---|---|
| von Willebrand factor (vWF) | Acts as bridge between GPIb-V-IX |
| | complex and collagen |
| Protein C | Activated by thrombin bound to |
| | thrombomodulin; Ca degrades factors |
| | VIIIa and Va |
| Protein S | Acts as cofactor of protein C |
| Thrombomodulin | Endothelial cell surface protein; binds |
| | thrombin, which activates protein C |
| Antithrombin III | Coagulation inhibitor, primarily of |
| | thrombin and factor Xa, but also factors |
| | IXa, XIa, and XIIa, and factor VIIa |
| | complexed with TF |
| Tissue Factor Pathway | Binds FXa and then forms a quaternary |
| Inhibitor (TFPI) | structure with TF/FVIIa to inhibit |
| | TF/FVIIa activity |

*Table adapted from M. W. King (2006) med.unibs.it/~marchesi/blood.html

### C. Factor VII (FVII)

[0191] Factor VII is a vitamin K-dependent serine protease glycoprotein that is synthesized in animals, including mammals, as a single-chain zymogen in the liver and secreted into the blood stream. As described above, FVII is the coagulation protease responsible for initiating the cascade of proteolytic events that lead to thrombin generation and fibrin deposition. It is part of the extrinsic pathway, although the downstream effects of its activity also impact greatly on the intrinsic pathway. This integral role in clot formation has attracted significant interest in FVII as a target for clinical anti-coagulant and haemostatic therapies. For example, recombinant activated FVII (rFVIIa) has been developed as a haemostatic agent for use in hemophilic subjects, and subjects with other bleeding conditions. Provided herein are modified FVII polypeptides that are designed to have increased coagulation activity upon activation, and that can serve as improved therapeutics to treat diseases and conditions amenable to factor VII therapy.

[0192] 1. FVII Structure and Organization

[0193] The human FVII gene (F7) is located on chromosome 13 at 13q34 and is 12.8 kb long with 9 exons. The FVII gene shares significant organizational similarity with genes coding for other vitamin-K dependent proteins, such as prothrombin, factor IX, factor X and protein C. The mRNA for FVII undergoes alternative splicing to produce two transcripts: variant 1 (Genbank Accession No. NM_{—}000131, set forth in SEQ ID NO: 108) and variant 2 (Genbank Accession No. NM_{—}019616, set forth in SEQ ID NO: 109). Transcript variant 2, which is the more abundant form in the liver, does not include exon 1b and thus encodes a shorter precursor polypeptide of 444 amino acids (FVII isoform b precursor; SEQ ID NO:2), compared with the 466 amino acid precursor polypeptide encoded by transcript variant 1 (FVII isoform a precursor; SEQ ID NO:1). The amino acids that are not present in the FVII isoform b precursor polypeptide correspond to amino acid positions 22 to 43 of the FVII isoform a precursor. These amino acids are part of the propeptide sequence, resulting in truncated FVII isoform b propeptide. The precursor polypeptides are made up of the following segments and domains: a hydrophobic signal peptide (aa 1-20 of SEQ ID NO:1 and 2), a propeptide (aa 21-60 of SEQ ID NO:1, and aa 21-38 of SEQ ID NO:2), a Gla domain (aa 39-83 of SEQ ID NO:1, and aa 61-105 of SEQ ID NO: 2), a type B epidermal growth factor domain (EGF-like 1, aa 84-120 of SEQ ID NO: 1, and aa 106-142 of SEQ ID NO: 2), a type A epidermal growth factor domain (EGF-like 2, aa 125-166 of SEQ ID NO: 1; and aa 147-188 of SEQ ID NO: 2), and a serine protease domain (aa 191-430 of SEQ ID NO: 1, and aa 213-452 of SEQ ID NO: 2).

[0194] The 406 amino acid mature form of the FVII polypeptide (SEQ ID NO: 3) lacks the signal peptide and propeptide sequences, and is identical in length and sequence regardless of the isoform precursor from which it originated. In the mature form of the FVII polypeptide the corresponding amino acid positions for the above mentioned domains are as follows: Gla domain (aa 1-45 of SEQ ID NO: 3), EGF-like 1 (aa 46-82 of SEQ ID NO: 3), EGF-like 2 (aa 87-128 of SEQ ID NO: 3), and serine protease domain (aa 153-392 of SEQ ID NO: 3).

[0195] The Gla domain of FVII is a membrane binding motif which, in the presence of calcium ions, interacts with phospholipid membranes that include phosphatidylserine. The Gla domain also plays a role in binding to the FVIIa cofactor, tissue factor (TF). Complexed with TF, the Gla domain of FVIIa is loaded with seven Ca²⁺ ions, projects three hydrophobic side chains in the direction of the cell membrane for interaction with phospholipids on the cell surface, and has significant contact with the C-terminal domain of TF. The Gla domain is conserved among vitamin K-dependent proteins, such as prothrombin, coagulation factors VII, IX and X, proteins C, S, and Z. These proteins require vitamin K for the posttranslational synthesis of γ-carboxyglutamic acid, an amino acid clustered in the N-terminal Gla domain of these proteins. All glutamic residues present in the domain are potential carboxylation sites and many of them are therefore modified by carboxylation.

[0196] In addition to the Gla domain, the mature FVII protein also contains two EGF-like domains. The first EGF-like domain (EGF-like 1 or EGF1) is a calcium-binding EGF domain, in which six conserved core cysteines form three disulfide bridges. The EGF1 domain of FVII binds just one Ca²⁺ ion, but with significantly higher affinity than that observed with the Gla domain (Banner et al. (1996) Nature 380:41-46). This bound Ca²⁺ ion promotes the strong interaction between the EGF1 domain of FVII and TF (Osterbund et al. (2000) Eur J Biochem 267:6204-6211.) The second EGF-like domain (EGF-like 2 or EGF2) is not a calcium-binding domain, but also forms 3 disulphide bridges. Like the other domains in FVII, the EGF2 domain interacts with TF. It also is disulphide-bonded together with the protease domain, with which it shares a large contact interface.

[0197] Finally, the serine protease domain of FVII is the domain responsible for the proteolytic activity of FVIIa. The sequence of amino acids of FVII in its catalytic domain displays high sequence identity and tertiary structure similarity with other serine proteases such as trypsin and chymotrypsin (Jin et al. (2001) J Mol Biol, 307: 1503-1517). For example, these serine proteases share a common catalytic triad H57, D102, S195, based on chymotrypsin numbering. Unlike other serine proteases, however, cleavage of FVIIa is not sufficient to complete the conversion of the zymogen to a fully active enzyme. Instead, as discussed below, FVIIa is allosterically activated in its catalytic function by binding to the cell-surface receptor TF, which induces a conformational change in the FVIIa protease domain switching it from a zymogen-like inactive state to a catalytically active enzyme. A helix loop region between the cofactor binding site and the active site (i.e. amino acid residue positions 305-321, corresponding to residues 163-170 based on chymotrypsin numbering) of FVIIa is important for the allostery and zymogenicity of FVIIa (Persson et al. (2004) Biochem J., 379: 497-503). This region is composed of a short α helix (amino acid residue positions 307 to 312) followed by a loop. The N-terminal portion of the helix forms part of the interface between the protease domain and TF, and contains a number of residues that are important for proteolytic function and optimal binding to TF. A comparison of the crystal structure of FVIIa alone and FVIIa complexed with TF indicates that the α helix undergoes significant conformational change when FVIIa binds TF. The α helix of FVIIa alone appears distorted, shortened and oriented differently. This affects adjacent loop structures, moving them away from the active site. In contrast, the α helix of FVIIa when complexed with TF is stabilized, and the neighboring loops are positioned closer to the active site. This stabilization is effected through mechanisms that involve at least the methionine at amino acid position 306 (amino acid residue Met¹⁶⁴ by chymotrypsin numbering) of FVII (Pike et al. (1999) PNAS 8925-8930).

[0198] 2. Post-Translational Modifications

[0199] The FVII precursor polypeptide (either isoform of the Factor VII gene) is targeted to the cellular secretory pathway by the hydrophobic signal peptide, which inserts into the endoplasmic reticulum (ER) to initiate translocation across the membrane. While the protein is translocated through the ER membrane, the 20 amino acid signal peptide is cleaved off by a signal peptidase within the ER lumen, after which the polypeptide undergoes further post-translational modifications, including N- and O-glycosylation, vitamin K-dependent carboxylation of N-terminal glutamic acids to γ-carboxyglutamic acids, and hydroxylation of aspartic acid to β-hydroxyaspartic acid.

[0200] The propeptide provides a binding site for a vitamin K-dependent carboxylase which recognizes a 10-residue amphipathic α-helix in the FVII propeptide. After binding, the carboxylase γ-carboxylates 10 glutamic acid residues within the Gla domain of the FVII polypeptide, producing γ-carboxyglutamyl residues at positions E66, E67, E74, E76, E79, E80, E85, E86, E89 and E95 relative to the FVII precursor amino acid sequence set forth in SEQ ID NO: 2. These positions correspond to positions E6, E7, E14, E19, E20, E25, E26, E29 and E35 of the mature FVII polypeptide set forth in SEQ ID NO: 3. For optimal activity, the FVII molecule requires calcium, which binds the polypeptide and facilitates the conformational changes needed for binding of FVIIa with TF and lipids. The γ-carboxylated Gla domain binds seven Ca²⁺ ions with variable affinity, which induces the conformational change that enables the Gla domain to interact with the C-terminal domain of TF, and also phosphatidylserines or other negatively charged phospholipids on the platelet membrane.

[0201] N-linked glycosylation is carried out by transfer of Glc₃Man₉ (GlcNAc) to two asparagine residues in the FVII polypeptide, at positions that correspond to amino acid residues145 and 262 of the mature protein (SEQ ID NO:3). O-linked glycosylation occurs at amino acid residues 52 and 60 of the mature polypeptide, and hydroxylation to a β-hydroxyaspartic acid accurs at the aspartic acid residue at position 63. These O-glycosylated serine residues and the β-hydroxylated aspartic acid residue are in the EGF-1 domain of FVII. These modifications are effected in the ER and Golgi complex before final processing of the polypeptide to its mature form.

[0202] 3. FVII Processing

[0203] The modified pro-FVII polypeptide is transported through the Golgi lumen to the trans-Golgi compartment where the propeptide is cleaved by a propeptidase just prior to secretion of the protein from the cell. PACE/furin (where PACE is an acronym for Paired basic Amino acid Cleaving Enzyme) is an endopeptidase localized to the Golgi membrane that cleaves many proteins on the carboxyterminal side of the sequence motif Arg-[any residue]-(Lys or Arg)-Arg. This propeptidase cleaves vitamin K-dependent glycoproteins such as the pro-factor IX and pro-vWF polypeptides (Himmelspach et al. (2000) Thromb Research 97; 51-67), releasing the propeptide from the mature protein. Inclusion of an appropriate PACE/furin recognition site into recombinant Factor VII precursors facilitates correct processing and secretion of the recombinant polypeptide (Margaritas et al. (2004) Clin Invest 113(7): 1025-1031). PACE/furin, or another subtilising-like propeptidase enzyme, is likely responsible for the proteolytic processing of pro-FVII to FVII. It can recognize and bind to the -Arg-Arg-Arg-Arg-consensus motif at amino acid positions 35-38 of the sequences set forth in SEQ ID NO:1, and 57-60 of the sequence set forth in SEQ ID NO:2, cleaving the propeptide and releasing the mature protein for secretion.

[0204] 4. FVII Activation

[0205] The vast majority of FVII in the blood is in the form of an unactivated single-chain zymogen, although a small amount is present in a two-chain activated form. Activation of FVII occurs upon proteolytic cleavage of the Arg¹⁵²-Ile¹⁵³ bond (positions relative to the mature FVII polypeptide, set forth in SEQ ID NO:3), giving rise to a two-chain polypeptide containing a 152 amino acid light chain (approximately 20 kDa) linked by a disulphide bridge to a 254 amino acid heavy chain (approximately 30 kDa). The light chain of FVIIa contains the Gla domain and EGF-like domains, while the heavy chain contains the catalytic or serine-protease portion of the molecule. Conversion of the single chain FVII into the two-chain FVIIa is mediated by cleavage by FIXa, FXa, FXIIa, thrombin, or in an autocatalytic manner by endogenous FVIIa (Butenas et al. (1996) Biochem 35:1904-1910; Nakagaki et al. (1991) Biochem 30:10819-10824). The trace amount of FVIIa that does occur in circulation likely arises from the action of FXa and FIXa.

[0206] As discussed above, cleavage of FVII from its zymogen form to FVIIa is not sufficient for full activity. FVIIa requires association with TF for full activity (Higashi et al. (1996) J Biol Chem 271:26569-26574). Because of this requirement, FVIIa alone has been ascribed zymogen-like features, displaying zymogen folding and shape, and exhibiting relatively low activity. This zymogen-like characteristic of FVIIa in the absence of its association with TF makes it relatively resistant to antithrombin III (AT-III) and other serpins, which generally act primarily on the active forms of serine proteases rather than the zymogen form. In addition, TFPI, the principal inhibitor of TF/FVIIa activity, also does not bind efficiently to the “inactive” uncomplexed form of FVIIa.

[0207] Upon complexation with TF, FVIIa undergoes a conformational change that permits full activity of the molecule. All of the FVII domains are involved in the interaction with TF, but the conformational changes that occur are localized to the protease domain of FVIIa. For example, the conformational changes that occur in upon allosteric interaction of FVIIa and TF include the creation of an extended macromolecular substrate binding exosite. This extended binding site greatly enhances the FVII-mediated proteolytic activation of factor X.

[0208] The activity of FVIIa is further increased (i.e. a thousand-fold) when the interaction of FVIIa is with cell surface-expressed TF. This is because phospholipid membranes containing negatively-charged phospholipids, such as phosphatidylserine, are a site of interaction of other vitamin-K dependent coagulation factors such as FIX and FX, which bind via their Gla domains. Thus, the local concentration of these vitamin K-dependent proteins is high at the cell surface, promoting their interaction with the TF/FVIIa complex.

[0209] 5. FVII Function

[0210] Although FVIIa exhibits increased activity following allosteric activation by TF, there is evidence that mechanisms exist in which FVIIa alone can initiate coagulation. Hence, FVII can function in a TF-dependent and a TF-independent manner. This latter pathway can play a much smaller role in normal hemostasis, although its significance could when it is considered in the context of bleeding disorders, and the treatment thereof.

[0211] a. Tissue Factor-Dependent FVIIa Activity

[0212] Circulating FVII binds cell-surface TF and is activated by FIXa, FXa, thrombin, or in an autocatalytic manner by endogenous FVIIa as described above. Alternatively, the very small amount of circulating FVIIa can directly bind TF. The TF/FVIIa complex then binds a small fraction of plasma FX and the FVIIa catalytic domain cleaves FX to produce FXa. Thrombin is thus formed via the extrinsic pathway on the surface of the TF-bearing cell, when FXa complexes with FVa and activates prothrombin to thrombin (FIG. 3). FIX also is activated by the TF/FVIIa complex, providing a link to the intrinsic pathway that operates on the surface of the activated platelet. The positive feedback systems in the coagulation cascade described above provide the means by which large amounts of thrombin are produced, which cleaves fibrinogen into fibrin to form a clot.

[0213] b. Tissue Factor-Independent FVIIa Activity

[0214] In addition to the TF-dependent mechanism for the activation of FX to FXa, there is evidence that FVIIa also can activate FX in the absence of TF. Activated platelets translocate phosphatidylserines and other negatively charged phospholipids to the outer, plasma-oriented surface. (Hemker et al. (1983) Blood Cells 9:303-317). These provide alternative “receptors” through which FVIIa can bind, albeit with a relatively low affinity that is 1000-fold less than the binding affinity of FVIIa to TF (Monroe et al., (1997) Br J Haematol 99:542-7). This interaction is mediated through residues in the Gla domain (Harvey et al. (2003) 278:8363-8369). FVIIa can then convert FX to FXa and FIX to FIXa on the activated platelet surface (Hoffman et al. (1998) Blood Coagul Fibrinolysis 9:S61-S65). The FXa remains associated with the platelet surface, where it can bind to FVa and generate sufficient thrombin from prothrombin, while the newly formed FIXa assembles with FVIIIa to catalyze the activation of more FX to FXa (FIG. 3). Hemostasis in the absence of TF can then achieved by the positive feedback and propagation mechanisms described above. It is notable, however, that while FVIIIa can contribute to the coagulation process on the activated platelet, its presence is not required for thrombin generation in the TF-independent mechanism (FIG. 3). Thus, in the absence of FVIII, such as in hemophilia patients, there is evidence that FVIIa can initiate and/or amplify thrombin generation through this secondary mechanism, and effect clot formation.

[0215] 6. FVII as a Biopharmaceutical

[0216] FVII functions to initiate blood coagulation. Recombinant FVIIa (NovoSeven®; rFVIIa) is approved for treatment of bleeding episodes or prevention of bleeding in surgical or invasive procedures in patients having hemophilia A or B with inhibitors to Factor VIII or Factor IX, and in patients with congenital Factor VII deficiency. Novoseven® is a genetically engineered preparation of factor VIIa that is produced in a mammalian expression system using baby hamster kidney (BHK) cells. The agent is nearly identical to plasma-derived factor VIIa in its structure and function (Ratko et al. (2004), P & T, 29: 712-720).

[0217] Administration of recombinant FVIIa (rFVIIa) has been shown to promote blood clotting in patients suffering from hemophilia, and treatment with doses of FVIIa have been found to be safe and well-tolerated in human subjects. Typically, the use of rFVIIa has been in patients who have developed inhibitors (i.e. alloantibodies) to Factor VIII or Factor IX. The use of rFVIIa as a coagulant has been extended to treatment of other bleeding disorders, for example Glanzmann's thrombasthenia; other events associated with extensive bleeding, such as a result of trauma or surgery including, but not limited to, liver transplants, prostate surgery and hemorrhaging trauma; neonatal coagulophathies, severe hepatic disease; bone marrow transplantation, thrombocytopenias and platelet function disorders; urgent reversal of oral anticoagulation; congenital deficiencies of factors V, VII, X, and XI; and von Willebrand disease with inhibitors to von Willebrand factor.

[0218] A high-dose of rFVII is required to achieve a therapeutic effect. The dose and dosing regime required for rFVII administration varies depending on the clinical indication. For example, the typical dosage of rFVII for hemorrhagic episodes in patients with hemophilia A or hemophilia B having alloantibodies is 90 μg/kg administered by intravenous (IV) injection. Since rFVII has a half-life of 2 hours, repeat dosing is required. Additional dosing can be given every two hours until hemostasis is achieved. The dose range can be altered depending on the severity of the condition. For example, doses ranging from 35-120 μg/kg have been efficacious. Also, the dose and dosing regime can vary with other indications. For example, hemophilia A or hemophilia B patients undergoing surgery can be administered with an initial dose of 90 μg/kg immediately before surgery, with repeat dosing given every two hours during and following surgery. Depending on the severity of the surgery and bleeding episode, the bolus IV infusion can continue every two to six hours until healing is achieved. In congenital FVII deficient patients, rFVII is typically administered to prevent bleeding in surgery or other invasive procedures at 15-30 μg/kg every 4-6 hours until hemostasis is achieved.

[0219] The mechanism of action of rFVIIa to initiate hemostasis explains the high-dose requirement. Hemophilia patients have a normal initiation phase of coagulation, where the TF/FVIIa complex activates FX to FXa and leads to thrombin production at the site of the TF-bearing cell. Thereafter, however, the coagulation process breaks down as hemophilia patients lack FVIII (hemophilia A) or FIX (hemophilia B), and are therefore unable to form the FVIIIa/FIXa complexes on the surface of the activated platelet, which normally serve to activate large amounts of FX to FXa in the amplification and propagation phases described previously. Due to the presence of inhibitors, such as TFPI and AT-III, the FXa that is produced on the TF-bearing cell following cleavage by TF/FVIIa is unable to easily diffuse between cell surfaces. As a result, large-scale thrombin generation on the surface of the activated platelet does not occur, and a clot is not formed.

[0220] There is evidence that the hemostatic effect of high doses of rFVIIa can be achieved using TF-dependent and/or TF-independent generation of FXa by rFVIIa on the activated platelets (FIG. 3). TF-dependent thrombin generation can be maximized very quickly with the saturation of TF molecules with endogenous FVIIa and rFVIIa. In some instances, the high dose rFVIIa can bind activated platelets and convert FX to FXa. The surface-associated FXa activates FVa to generate sufficient thrombin for hemostasis. Since rFVII binds to the platelet surface with low affinity, a higher dose of rFVII can be required for thrombin generation. The activation of FXa on activated platelets ensures that rFVIIa-mediated hemostasis is localized to the site of injury.

[0221] A means to achieve reduced dosage of rFVII can improve its utility and efficiency as a drug. Provided herein are modified FVII polypeptides. Among these are modified FVII polypeptides that exhibit increased resistance to TFPI, increased resistance to AT-III, improved pharmacokinetic properties, such as increased half-life, increased catalytic activity in the presence and/or absence of TF, and/or increased binding to activated platelets. These FVII polypeptides can exhibit increased coagulant activity. FVII polypeptides provided herein can be used in treatments to initiate hemostasis in a TF-dependent and/or a TF-independent mechanism such that FXa is produced and thrombin generated.

### D. Modified FVII Polypeptides

[0222] Provided herein are modified FVII polypeptides. The FVII polypeptides exhibit alterations in one or more activities or properties compared with an unmodified FVII polypeptide. The activities or properties that can be altered as a result of modification include, but are not limited to, coagulation or coagulant activity; pro-coagulant activity; proteolytic or catalytic activity such as to effect factor X (FX) activation or Factor IX (FIX) activation; antigenicity (ability to bind to or compete with a polypeptide for binding to an anti-FVII antibody); ability to bind tissue factor, factor X or factor IX; ability to bind to the cell surface of activated platelets; ability to bind to phospholipids; half-life; three-dimensional structure; pI; and/or conformation. Typically, the modified FVII polypeptides exhibit procoagulant activity. Provided herein are modified FVII polypeptides that exhibit increased coagulant activity upon activation from their single-chain zymogen form. Such modified FVII polypeptides can be used in the treatment of bleeding disorders or events, such as hemophilias or injury, where FVII polypeptides can function to promote blood coagulation. Included among such modified FVII polypeptides are those that have increased resistance to inhibitors such as tissue factor pathway inhibitor (TFPI) and antithrombin III (AT-III), those that have increased catalytic activity in the presence and/or absence of TF, those that have improved pharmacokinetic properties, such as increased half-life and those that have increased binding and/or affinity for the platelet surface. In particular, such modified FVII polypeptides can be used in diseases or conditions to provide coagulant activity while at the same time bypassing the requirements for FVIIIa and FIXa. In one example, modified FVII polypeptides provided herein can be used in hemophiliac patients having autoantibodies to FVIIIa and FIXa. Hence, the modified FVII polypeptides provided herein offer advantages including a decrease in the amount of administered FVII that is required to maintain a sufficient concentration of active FVII in the serum for hemostasis. This can lead to, for example, lower doses and/or dosage frequency necessary to achieve comparable biological effects, faster onset of therapeutic benefit, faster amelioration of acute bleeding episodes, higher comfort and acceptance by subjects, and attenuation of secondary, non-beneficial effects.

[0223] Modifications in a FVII polypeptide can be made to any form of a FVII polypeptide, including allelic and species variants, splice variants, variants known in the art, or hybrid or chimeric FVII molecules. For example, the modifications provided herein can be made in a precursor FVII polypeptide set forth in SEQ ID NOS:1 or 2, a mature FVII polypeptide set forth in SEQ ID NO:3, or any species, allelic or modified variants and active fragments thereof, that has 40%, 50%, 60%, 70%, 80%, 90%, 91%, 92%, 93%, 94%, 95%, 96%, 97%, 98%, or 99% sequence identity to any of the FVII polypeptides set forth in SEQ ID NOS: 1-3. Allelic variants of FVII include, but are not limited to, any of those precursor polypeptides having a sequence of amino acids set forth in any of SEQ ID NOS: 18-74. Exemplary species variants for modification herein include, but are not limited to, human and non-human polypeptides including FVII polypeptides from cow, pygmy chimpanzee, chimpanzee, rabbit, rat, rhesus macaque, pig, dog, zebra fish, pufferfish, chicken, orangutan and gorilla FVII polypeptides, whose sequences are set forth in SEQ ID NOS: 4-17 respectively. Modifications in a FVII polypeptide can be made to a FVII polypeptide that also contains other modifications, such as those described in the art, including modifications of the primary sequence and modifications not in the primary sequence of the polypeptide.

[0224] Modification of FVII polypeptides also include modification of polypeptides that are hybrids of different FVII polypeptides and also synthetic FVII polypeptides prepared recombinantly or synthesized or constructed by other methods known in the art based upon the sequence of known polypeptides. For example, based on alignment of FVII with other coagulation factor family members, such as factor IX (FIX) or factor X (FX), homologous domains among the family members are readily identified. Chimeric variants of FVII polypeptides can be constructed where one or more amino acids or entire domains are replaced in the FVII amino acid sequence using the amino acid sequence of the corresponding family member. Additionally, chimeric FVII polypeptides include those where one or more amino acids or entire domains are replaced in the human FVII amino acid sequence using the amino acid sequence of a different species (see, e.g., Williamson et al. (2005) J Thromb Haemost 3:1250-6). Such chimeric proteins can be used as the starting, unmodified FVII polypeptide herein.

[0225] Modifications provided herein of a starting, unmodified reference polypeptide include amino acid replacements or substitution, additions or deletions of amino acids, or any combination thereof. For example, modified FVII polypeptides include those with 1, 2, 3, 4, 5, 6, 7, 8, 9, 10, 11, 12, 13, 14, 15, 16, 17, 18, 19, 20, 30, 40, 50 or more modified positions. Also provided herein are modified FVII polypeptides with two or more modifications compared to a starting reference FVII polypeptide. Modified FVII polypeptides include those with 2, 3, 4, 5, 6, 7, 8, 9, 10, 11, 12, 13, 14, 15, 16, 17, 18, 19, 20, 30, 40, 50 or more modified positions. Any modification provided herein can be combined with any other modification known to one of skill in the art so long as the resulting modified FVII polypeptide exhibits increased coagulation activity when it is in its two-chain or activated form. Typically, the modified FVII polypeptides exhibit increased coagulant activity. The activities or properties that can be altered as a result of modification include, but are not limited to, coagulation or coagulant activity; pro-coagulant activity; proteolytic or catalytic activity such as to effect factor X (FX) activation or Factor IX (FIX) activation; antigenicity (ability to bind to or compete with a polypeptide for binding to an anti-FVII antibody); ability to bind tissue factor, tissue factor inhibitory factor (TFPI), antithrombin III, factor X or factor IX; ability to the surface of activated platelets; ability to bind to phospholipids; serum half-life; three-dimensional structure; pI; and/or conformation. Included among the modified FVII polypeptides provided herein are those that have increased resistance to tissue factor pathway inhibitor (TFPI), increased resistance to antithrombin III (AT-III), increased catalytic activity in the presence and/or absence of TF, improved pharmacokinetic properties, such as increased serum half-life, increased intrinsic activity and/or increased affinity and/or binding for activated platelets.

[0226] In some examples, a modification can affect two or more properties or activities of a FVII polypeptide. For example, a modification can result in increased TFPI resistance and increased catalytic activity of the modified FVII polypeptide compared to an unmodified FVII polypeptide. Modified FVII polypeptides provided herein can be assayed for each property and activity to identify the range of effects of a modification. Such assays are known in the art and described below. Modified FVII polypeptides provided herein also include FVII polypeptides that are additionally modified by the cellular machinery and include, for example, glycosylated, γ-carboxylated and β-hydroxylated polypeptides.

[0227] The modifications provided herein to a FVII polypeptide are made to increase increase TFPI resistance, increase AT-III resistance, improve pharmacokinetic properties, such as increase serum half-life, increase catalytic activity in the presence and/or absence of TF and/or increase affinity and/or binding for activated platelets. For example, a FVII polypeptide can include modification(s) that increase one or both of TFPI resistance and binding to platelets. In other examples, any modification provided herein can be combined with any other modification known to one of skill in the art so long as the resulting modified FVII polypeptide exhibits increased coagulation activity when it is in its two-chain form. Typically, such increased coagulation activity is due to increased resistance to TFPI, improved pharmacokinetic properties, such as increased serum half-life, increased resistance to AT-III, altered glycosylation, increased catalytic activity, and/or increased binding and/or affinity for phospholipids. In some examples, modifications that are introduced into a FVII polypeptide to alter a specific activity or property also, or instead, can affect another activity or property. Thus, the modifications provided herein can affect the property or activity that they were designed to affect and one or more other properties or activities. For example, modifications made to a FVII polypeptide to increase TFPI resistance also can improve pharmacokinetic properties, such as serum half-life. In some examples, a single modification, such as single amino acid substitution, alters 2, 3, 4 or more properties or activities of a FVII polypeptide. Modified FVII polypeptides provided herein can be assayed for each property and activity to identify the range of effects of a modification. Such assays are known in the art and described below. Modified FVII polypeptides provided herein also include FVII polypeptides that are additionally modified by the cellular machinery and include, for example, glycosylated, γ-carboxylated and β-hydroxylated polypeptides.

[0228] The modifications provided herein can be made by standard recombinant DNA techniques such as are routine to one of skill in the art. Any method known in the art to effect mutation of any one or more amino acids in a target protein can be employed. Methods include standard site-directed mutagenesis (using e.g., a kit, such as kit such as QuikChange available from Stratagene) of encoding nucleic acid molecules, or by solid phase polypeptide synthesis methods. In addition, modified chimeric proteins provided herein (i.e. Gla domain swap) can be generated by routine recombinant DNA techniques. For example, chimeric polypeptides can be generated using restriction enzymes and cloning methodologies for routine subcloning of the desired chimeric polypeptide components.

[0229] Other modifications that are or are not in the primary sequence of the polypeptide also can be included in a modified FVII polypeptide, or conjugate thereof, including, but not limited to, the addition of a carbohydrate moiety, the addition of a polyethylene glycol (PEG) moiety, the addition of an Fc domain, etc. For example, such additional modifications can be made to increase the stability or half-life of the protein.

[0230] The resulting modified FVII polypeptides include those that are single-chain zymogen or active polypeptides or those that are one-chain or two-chain zymogen-like polypeptides. For example, any modified polypeptide provided herein that is a single-chain zymogen polypeptide can be autoactivated or activated by other coagulation factors to generate a modified FVII that is a two-chain form (i.e. FVIIa). The activities of a modified FVII polypeptide are typically exhibited in its two-chain form.

[0231] The modified FVII polypeptides provided herein can exhibit increased TFPI resistance, increased AT-III resistance, increased catalytic activity in the presence and/or absence of TF, improved pharmacokinetic properties, such as increased serum half-life, and/or increased binding and/or affinity for phospholipids. Typically, such properties and/or activities of the modified FVII polypeptides provided herein are made while retaining other FVII activities or properties, such as, but not limited to, binding to TF and/or binding and activation of FX. Hence, modified FVII polypeptides provided herein retain TF binding and/or FX binding and activation as compared to a wild-type or starting form of the FVII polypeptide. Typically, such activity is substantially unchanged (less than 1%, 5%, 10%, 20% or 30% changed) compared to a wild-type or starting protein. In other examples, the activity of a modified FVII polypeptide is increased or is decreased as compared to a wild-type or starting FVII polypeptide. Activity can be assessed in vitro, ex vivo or in vivo and can be compared to that of the unmodified FVII polypeptide, such as for example, the mature, wild-type native FVII polypeptide (SEQ ID NO: 3), the wild-type precursor FVII polypeptide (SEQ ID NO: 1 or 2), or any other FVII polypeptide known to one of skill in the art that is used as the starting material.

[0232] Hence, by virtue of the modifications provided herein, the modified FVII polypeptides can exhibit increased coagulation activity in a TF-dependent and/or TF-independent manner. Typically, the increased coagulation activity of the modified FVII polypeptides provided herein can be observed in vitro in appropriate assays, or in vivo, such as upon administration to a subject, such as a human or non-human subject. The increased activity of the modified FVII polypeptides can be enhanced by at least or about 1%, 2%, 3%, 4%, 5%, 6%, 7%, 8%, 9%, 10%, 20%, 30%, 40%, 50%, 60%, 70%, 80%, 90%, 100%, 110%, 120%, 130%, 140%, 150%, 160%, 170%, 180%, 190%, 200%, 300%, 400%, 500%, or more compared to the activity of the starting or unmodified FVIIa polypeptide.

[0233] 1. Increased Resistance to Inhibitors

[0234] Like most biological systems, the coagulation cascade is regulated by positive and negative mechanisms. These mechanisms often act by inhibiting or enhancing the activity of one or more factors involved in the cascade, either directly or indirectly. Hence, of interest are therapeutic coagulation factors that are resistant to the inhibitory mechanisms that negatively regulate their activity. In particular, of interest are modified FVII polypeptides that are resistant to the inhibitory molecules that normally inhibit FVII activity. The primary regulator of the TF/FVIIa complex is tissue factor pathway inhibitor (TFPI). Also inhibitory to FVIIa activity, albeit to a lesser extent, is antithrombin III (AT-III).

[0235] a. TFPI

[0236] Tissue factor pathway inhibitor is a single-chain polypeptide encoded by 9 exons located on chromosome 2q31-q32.1. TFPI (also referred to as TFPI-1) is a Kunitz-type inhibitor that is synthesized primarily by endothelial cells and contains a negatively charged amino terminal region, three tandem Kunitz-type inhibitor domains, and a highly basic carboxyl-terminal tail (Wun et al., J. Biol. Chem. 263:6001 (1988). Through alternative mRNA splicing, two different forms of TFPI are generated: TFPIα and β. TFPIα is a secreted protein with a molecular weight of approximately 46 kDa. The precursor polypeptide is 304 amino acids in length (SEQ ID NO:101), and is processed by cleavage of the 28 amino acid signal peptide, resulting in secretion of a 276 amino acid mature glycoprotein (SEQ ID NO:102). The mature protein contains 18 cysteine residues and forms 9 disulphide bridges when correctly folded. The primary sequence also contains three Asn-X-Ser/Thr N-linked glycosylation consensus sites, the asparagine residues located at positions 145, 195 and 256. The Kunitz-1 and -2 domains are responsible for binding and inhibition of the TF/FVIIa complex and FXa, respectively (see e.g., FIG. 4). The Kunitz-3 domain, which lacks proteinase inhibitory activity, and the C-terminus of TFPIα have been shown to be involved in its cell-surface localization (Piro et al. (2004) Circulation 110:3567-3572).

[0237] TFPIβ is an alternatively spliced form of TFPI in which the Kunitz-3 domain and the C-terminal region of TFPIα is replaced with an unrelated C-terminal region that directs the attachment of a glycosylphosphatidylinositol (GPI) anchor. The precursor polypeptide (SEQ ID NO:103) is processed to a mature protein that is 223 amino acids (SEQ ID NO:104). Based on protein mass, TFPIβ (28 kDa) is considerably smaller than TFPIα (36 kDa). Both migrate with the same apparent molecular mass (46 kDa) on sodium dodecylsulfate-polyacrylamide gel electrophoresis (SDS-PAGE), suggesting a difference in post-translational modifications. TFPIα and β are bound at the cell surface in a GPI-dependent manner. TFPIβ contains a GPI-anchor at its C-terminus, whereas TFPIα is apparently bound to a not yet identified GPI-linked protein(s). Although TFPIβ represents only 20% of total surface-TFPI, it accounts for most of the anti-TF/FVIIa activity, suggesting a potential alternative role for cell-surface TFPIα, such as binding and clearance of FXa (Piro et al. (2005) J Thromb Haemost 3:2677-2683).

[0238] TFPI inhibits the coagulation cascade in at least two ways; by binding to the active site of FXa, and by inactivating the TF/FVIIa complex (see e.g., FIG. 4). The first Kunitz-domain is binds FVIIa, while the second domain binds FXa (Girard et al. (1989) Nature 338:518-520). Free TFPI binds FVIIa very slowly in comparison with its binding of FXa. Once bound to FXa however, the TFPI/FXa complex displays strong affinity for the TF/FVIIa complex. Their interaction results in the formation of a heterotetrameric complex at the endothelial cell surface in which FVIIa is catalytically inactive (FIG. 4). This quaternary structure therefore prevents TF/FVIIa-initiation of the coagulation cascade.

[0239] At least one other homolog of TFPI exists in humans, TFPI-2, also known as placental protein 5 (PP5) and matrix-associated serine protease inhibitor (MSPI). TFPI-2 is a 32 kDa matrix-associated Kunitz-type serine proteinase inhibitor which exhibits inhibitory activity toward a broad spectrum of proteinases, including trypsin, plasmin, chymotrypsin, cathepsin G, plasma kallikrein, and the factor VIIa-tissue factor complex. The 213 amino acid mature TFPI-2 protein (SEQ ID NO:105) contains three Kunitz-type domains that exhibit 43%, 35% and 53% primary sequence identity with TFPI Kunitz-type domains 1, 2, and 3, respectively. The first Kunitz-type domain of human TFPI-2 contains all the structural elements for the inhibition of the serine proteases, although kinetic and molecular studies indicate that TFPI-2 is a more effective inhibitor of plasmin than several other serine proteinases, including TF/FVIIa (Chand et al. (2004) J Biol Chem 279:17500-17507). It is thought to play an important role in the regulation of extracellular matrix digestion and remodeling. In this context, reduced synthesis of TFPI-2 has been related to numerous pathophysiological processes such as inflammation, angiogenesis, atherosclerosis, retinal degeneration and tumor growth/metastasis (Chand et al. (2005) Thromb Haemost 94:1122-30). Thus, while homologous to TFPI, TFPI-2 is not thought to be as important a factor in the coagulation pathway. The sequence alignment of the Kunitz-1 domain sequence of TFPI-1 and TFPI-2 is set forth in FIG. 6b.

[0240] Immunodepletion of TFPI in a rabbit model enhanced coagulation (Warn-Cramer et al. (1993) Arterioscl Thromb 13:1551-1557, Ragni et al. (2000) Circulation 102:113-117), indicating that disruption of the formation of TF/FVIIa-TFPI/FXa quaternary complex can inhibit the negative regulation of TF/FVIIa initiation of coagulation. Additionally, disruption of the interaction of FVIIa with TFPI can decrease the clearance of FVIIa. Decreased clearance can be manifested as increased half-life. Also, FVIIa bound to cell surface TF can be internalized and degraded without depleting the TF on the cell surface. This form of internalization and degradation is significantly increased in the presence of TFPI/FXa, which forms a quaternary complex with the cell-surface TF/FVIIa. The internalization and degradation that follows binding is mediated through a low density lipoprotein receptor-related protein (LRP)-dependent coated pit pathway (Iakhiaev et al., (1999) J. Biol. Chem. 274:36995-37003). TFPI also can help mediate FVIIa clearance through other mechanisms, such as hepatic or renal clearance mechanisms.

### Modifications to Effect Increased Resistance to TFPI

[0241] Provided herein are modified FVII polypeptides exhibiting increased resistance to TFPI. Such resistance to TFPI can be achieved, for example, by mutation of one or more residues in FVII involved in the interaction and binding with TFPI to reduce or prevent such binding, thereby making the modified FVII polypeptides resistant to the naturally inhibitory effects of TFPI with respect to coagulation initiation. When evaluated in an appropriate in vitro assay, or in vivo, such as following administration to a subject as a pro-coagulant therapeutic, the modified TFPI-resistant FVII polypeptides can display increased coagulant activity as compared with unmodified FVII polypeptides. Among FVIIa mutants that exhibit increased TFPI resistance, are mutants that have increased half-life. For example, the mutant described in Example 9 exhibits increased half-life.

[0242] Provided herein are modified FVII polypeptides having one or more mutations in FVII/TFPI contact residues or residues in close proximity to the interaction interface. Such contact residues include the aspartic acid residue at position 196 (D196, Asp¹⁹⁶), the lysine residue at position 197 (K197, Lys¹⁹⁷), the lysine residue at position 199 (K199, Lys¹⁹⁹), the threonine residue at position 239 (T239, Thr²³⁹), the arginine residue at position 290 (R290, Arg²⁹⁰), and the lysine residue at position 341 (K341, Lys³⁴¹), with numbering relative to the amino acid positions of a mature FVII polypeptide set forth in SEQ ID NO:3. When identified using chymotrypsin numbering, these residues correspond to D60, K60a, K60c, T99, R147 and K192 (FIG. 7). A residue that is in close proximity to the FVII/TFPI interface, and which can be modified to cause steric hindrance, is the glycine residue at position 237 (G237, Gly¹³⁷) by mature FVII numbering, which corresponds to G97 (Gly⁹⁷) by chymotrypsin numbering.

[0243] The identified residues can be modified such as by amino acid replacement, deletion or substitution. Alternatively, amino acid insertions can be used to alter the conformation of a targeted amino acid residue or the protein structure in the vicinity of a targeted amino acid residue. For example, the identified residues can be replaced or substituted with another amino acid in order to disrupt the interaction between FVII and TFPI and inhibit efficient binding of the two proteins, thereby generating a TFPI-resistant modified FVII polypeptide. For example, substitution of an amino acid that sterically hinders interaction of FVII and TFPI is contemplated (i.e. substitution of Gly¹³¹ (Gly⁹⁷) with another larger amino acid). In other embodiments, the TFPI-resistant modified FVII polypeptides can be generated by replacing a contact residue with an alternative amino acid such that charge-reversal or charge-neutralization is achieved at the identified position. These types of mutations can significantly affect the electrostatic contributions of the substituted FVII amino acid and disrupt the normal interaction of the contact residue with corresponding TFPI contact residue(s). For example, a negatively charged aspartic acid residue in FVII, which might normally interact favorably with a positively charged arginine residue in TFPI, can be replaced with a positively charged lysine to not only eliminate the original favorable electrostatic interaction but also create a repulsive force between the residues and interfere with efficient binding of the proteins. This mutation, therefore, interferes with efficient binding of the proteins. Hence, a negatively charged amino acid (i.e. an acidic amino acid) such as aspartic acid (Asp, D) or glutamic acid (Glu, E) can be substituted with a positively charged amino acid (ie. a basic amino acid) such as lysine (Lys, K), arginine (Arg, R), or histidine (His, H). Conversely, a basic amino acid such as lysine (Lys, K), arginine (Arg, R), or histidine (His, H) can be substituted with an acidic amino acid such as aspartic acid (Asp, D) or glutamic acid (Glu, E). Also, any contact residue can be substituted with a neutral amino acid such as alanine (Ala, A), tyrosine (Tyr, Y) methionine (Met, M), or leucine (Leu, L), isoleucine (Ile, I), valine (Val, V), phenylalanine (Phe, F), proline (Pro, P) or glycine (Gly, G), serine (Ser, S), threonine (Thr, T), asparagine (Asn, N), glutamine (Gln, Q), tryptophan (Trp, W) and cysteine (Cys, C). Exemplary of neutral amino acids are hydrophobic amino acids, which include isoleucine (Ile, I), phenylalanine (Phe, F), valine (Val, V), leucine (Leu, L), tryptophan (Trp, W), methionine (Met, M), alanine (Ala, A), glycine (Gly, G), cysteine (Cys, C) and tyrosine (Tyr, Y).

[0244] In some embodiments, the glycine at position 237 by mature FVII numbering is be replaced such that the new amino acid causes steric hindrance and inhibits the interaction between FVII and TFPI. Glycine is the smallest and simplest of the amino acids, containing only a single hydrogen atom in its side chain. Due to its small size, glycine can fit into small spaces and can adopt particular conformations that other amino acids can not. Substitution of the glycine at position 237 with an amino acid with a larger side chain could cause steric hindrance with other amino acids in the FVII protein, thereby altering the conformation of the TFPI binding interface, and/or cause steric hindrance with amino acids in the TFPI protein. Both situations could result in impaired interaction and binding of FVII and TFPI, thereby increasing the resistance of the modified FVII polypeptide to the inhibitory effects of TFPI. Any of the 19 natural amino acids contain larger side chains than glycine, and could be used to modify the FVII polypeptide. Exemplary of these are tryptophan (Trp, W), isoleucine (Ile, I), valine (Val, V) and threonine (Thr, T).

[0245] In other examples, amino acid insertions are incorporated into the FVII polypeptide near the identified residues to interfere with the interaction between TFPI and FVII. One or more amino acid residues can be inserted at one or more positions in the FVII polypeptide. For example, a tyrosine residue can be inserted between D196 and K197 (corresponding to D60 and K60a, respectively, by chymotrypsin numbering). This modification is D196K197insY (i.e. D196 and K197 are the positions in between which a tyrosine has been inserted (insY)). In another example, two amino acid residues are inserted at a position identified as being important for interaction with TFPI. For example, an alanine and a serine can be inserted between G237 and T238 (corresponding to G97 and T98, respectively, by chymotrypsin numbering), resulting in the modification G237T238insAS. Such insertion mutations could result in impaired interaction and binding of FVII and TFPI, thereby increasing the resistance of the modified FVII polypeptide to the inhibitory effects of TFPI.

[0246] Table 5 provides non-limiting examples of exemplary amino acid replacements at the identified residues, corresponding to amino acid positions of a mature FVII polypeptide as set forth in SEQ ID NO:3. As noted, such FVII polypeptides are designed to increase resistance to TFPI by inhibiting FVII/TFPI binding, and therefore have increased coagulant activity. In reference to such mutations, the first amino acid (one-letter abbreviation) corresponds to the amino acid that is replaced, the number corresponds to the position in the mature FVII polypeptide sequence with reference to SEQ ID NO: 3, and the second amino acid (one-letter abbreviation) corresponds to the amino acid selected that replaces the first amino acid at that position. The amino acid positions for mutation also are referred to by the chymotrypsin numbering scheme. In Table 5 below, the sequence identifier (SEQ ID NO) is identified in which exemplary amino acid sequences of the modified FVII polypeptide are set forth, and also any polypeptide identification numbers.

TABLE 5

| Modification - | | | |
|---|---|---|---|
| mature | Modification - | | |
| FVII | chymotrypsin | Polypeptide | SEQ ID |
| numbering | numbering | ID number | NO |
| D196K | D60K | CB554 | 18 |
| D196R | D60R | CB555 | 19 |
| D196A | D60A | CB556 | 20 |
| D196Y | D60Y | CB601 | 125 |
| D196F | D60F | CB600 | 126 |
| D196W | D60W | CB602 | 127 |
| D196L | D60L | CB603 | 128 |
| D196I | D60I | CB604 | 129 |
| K197Y | K60aY | CB561 | 21 |
| K197A | K60aA | CB559 | 22 |
| K197E | K60aE | CB558 | 23 |
| K197D | K60aD | CB557 | 24 |
| K197L | K60aL | CB560 | 25 |
| K197M | K60aM | CB599 | 26 |
| K197I | K60aI | CB595 | 130 |
| K197V | K60aV | CB596 | 131 |
| K197F | K60aF | CB597 | 132 |
| K197W | K60aW | CB598 | 133 |
| K199A | K60cA | CB564 | 27 |
| K199D | K60cD | CB562 | 28 |
| K199E | K60cE | CB563 | 29 |
| G237W | G97W | CB605 | 134 |
| G237T | G97T | CB606 | 135 |
| G237I | G97I | CB607 | 136 |
| G237V | G97V | CB608 | 137 |
| T239A | T99A | CB565 | 30 |
| R290A | R147A | CB568 | 31 |
| R290E | R147E | CB567 | 32 |
| R290D | R147D | CB566 | 33 |
| R290N | R147N | CB697 | 206 |
| R290Q | R147Q | CB698 | 207 |
| R290K | R147K | CB699 | 208 |
| R290M | R147M | CB700 | 209 |
| R290V | R147V | CB701 | 210 |
| K341E | K192E | | 34 |
| K341R | K192R | CB569 | 35 |
| K341Q | K192Q | CB609 | 138 |
| K341N | K192N | CB733 | 211 |
| K341M | K192M | CB734 | 212 |
| K341D | K192D | CB735 | 213 |
| G237T238insA | G97T98insA | CB853 | 214 |
| G237T238insS | G97T98insS | CB854 | 215 |
| G237T238insV | G97T98insV | CB855 | 216 |
| G237T238insAS | G97T98insAS | CB856 | 217 |
| G237T238insSA | G97T98insSA | CB857 | 218 |
| D196K197insK | D60K60ainsK | CB858 | 219 |
| D196K197insR | D60K60ainsR | CB859 | 220 |
| D196K197insY | D60K60ainsY | CB860 | 221 |
| D196K197insW | D60K60ainsW | CB861 | 222 |
| D196K197insA | D60K60ainsA | CB862 | 223 |
| D196K197insM | D60K60ainsM | CB863 | 224 |
| K197I198insE | K60aI60binsE | CB864 | 225 |
| K197I198insY | K60aI60binsY | CB865 | 226 |
| K197I198insA | K60aI60binsA | CB866 | 227 |
| K197I198insS | K60aI60binsS | CB867 | 228 |

[0247] In a further embodiment, combination mutants can be generated. Included among such combination mutants are those having two or more mutations of the residues D196, K197, K199, G237, T239, R290 or K341 based on numbering of a mature FVII set forth in SEQ ID NO:3 (corresponding to D60, K60a, K60c, G97, T99, R147 and K192, respectively, based on chymotrypsin numbering). For example, a modified FVII polypeptide can possess amino acid substitutions at 2, 3, 4, 5, 6 or 7 of the identified positions. As noted above, residues are replaced such that favorable interactions between FVIIa and TFPI are eliminated, and unfavorable interactions are introduced, or steric hindrance is introduced, at one more positions. Hence, a modified polypeptide can display 1, 2, 3, 4, 5, 6 or 7 mutations that provide one or more of steric hindrance, charge-reversal, charge-neutralization, or other unfavourable interaction, or a combination thereof. For example, two or more mutations can be made whereby negatively charged amino acids such as aspartic acid (Asp, D) or glutamic acid (Glu, E) can be substituted with a positively charged amino acid such as lysine (Lys, K), arginine (Arg, R), or histidine (His, H), or vice versa, or neutral substitutions can be made by replacement of any amino acid with, for example, alanine (Ala, A), tyrosine (Tyr, Y) methionine (Met, M), or leucine (Leu, L), isoleucine (Ile, I), valine (Val, V), phenylalanine (Phe, F), proline (Pro, P) or glycine (Gly, G), serine (Ser, S), threonine (Thr, T), asparagine (Asn, N), glutamine (Gln, Q), tryptophan (Trp, W) and cysteine (Cys, C) or any combination thereof. Exemplary of neutral amino acids are hydrophobic amino acids, which include isoleucine (Ile, I), phenylalanine (Phe, F), valine (Val, V), leucine (Leu, L), tryptophan (Trp, W), methionine (Met, M), alanine (Ala, A), glycine (Gly, G), cysteine (Cys, C) and tyrosine (Tyr, Y). In another example, two or more mutations can be made where at least one is a charge reversal or charge-neutralization and another is a substitution that replaces glycine with amino acids that contain a larger side chain, such as tryptophan (Trp, W), isoleucine (Ile, I), valine (Val, V) and threonine (Thr, T). In other examples, an insertion mutation can be included in the modified FVII polypeptide with other insertion mutations, or with one or more amino acid substitutions, such as amino acid substitutions that introduce unfavourable interactions or steric hindrance between FVII and TFPI. Exemplary of combination mutants having two or more mutations of the residues D196, K197, K199, G237, T239, R290 or K341 based on numbering of a mature FVII set forth in SEQ ID NO:3 include those set forth in Table 6 (submitted on CD-R in compliance with 37 CFR 1.52(e) an incorporated by reference herein).

[0248] For example, FVII variants include those that include as one of their mutations an amino acid substitution at position 197, based on numbering of a mature FVII set forth in SEQ ID NO:3. Any amino acid residue can be substituted for the lysine residue that occupies position 197 in an unmodified FVII polypeptide. In some embodiments, the lysine is replaced by a tyrosine (Y), an alanine (A), a glutamic acid (E), an aspartic acid (D), a leucine (L), a methionine (M), an isoleucine (I), a valine (V), a phenylalanine (F), or a tryptophan (W) residue. For example, exemplary of a modified FVII polypeptide is one that contains the substitution K197L or K197E. In another example, a FVII polypeptide containing a modification at position 197 (such as a replacement, deletion or addition) also can include another modification at another position. Generally such other modification is at a position that is contemplated to modulate the interaction of FVII with TFPI, such as by removing a favorable interaction, creating an unfavorable interaction, introducing steric hindrance, or a combination thereof. Included among such additional modifications are modifications at amino acid positions corresponding to D196, K199, G237, T239, R290 or K341, such as described above. Other additional modifications known in the art, such as described below, also are contemplated. Hence, in addition to modification at position 197, a FVII polypeptide can contain 1, 2, 3, 4, 5, 6 or more amino acid modifications. For example, exemplary of FVII variants having at least a modification at position 197 include those containing 2 substitutions, such as D196F and K197E, those containing 3 substitutions, such as at D196R, K197M, and K199E, those containing 4 substitutions, such as D196R, K197E, K199E and R290E, those containing 5 substitutions, such as K197L, K199D, G237T, R290D and K341Q, those containing 6 substitutions, such as D196F, K197L, K199E, G237V, T239A and R290D, and those containing 7 substitutions, such as D196Y, K197L, K199A, G237T, T239A, R290D and K341R Exemplary FVII combination mutants that include as one of their mutations an amino acid substitution at position 197, based on numbering of a mature FVII set forth in SEQ ID NO:3, are included in Table 6.

[0249] Exemplary FVII polypeptides that contain two or more amino acid replacements at one or more amino acid residues of D196, K197, K199, G237, T239, R290 or K341, corresponding to amino acid positions of a mature FVII polypeptide as set forth in SEQ ID NO:3, are those provided in Table 7. In the table, amino acid positions for mutation also are referred to by the chymotrypsin numbering scheme. Such modifications are designed to increase resistance to TFPI by inhibiting FVII binding to TFPI, and therefore increase coagulation activity.

TABLE 7

| Modification - mature | Modification - | | |
|---|---|---|---|
| FVII | chymotrypsin | Polypeptide | SEQ ID |
| numbering | numbering | ID No. | NO |
| D196R/R290E | D60R/R147E | CB579 | 36 |
| D196K/R290E | D60K/R147E | CB580 | 37 |
| D196R/R290D | D60R/R147D | CB581 | 38 |
| D196R/K197E/K199E | D60R/K60aE/K60cE | CB586 | 39 |
| D196K/K197E/K199E | D60K/K60aE/K60cE | CB587 | 40 |
| D196R/K197E/K199E/ | D60R/K60aE/K60cE/ | CB588 | 41 |
| R290E | R147E | | |
| D196R/K197M/K199E | D60R/K60aM/K60cE | CB589 | 42 |
| D196R/K197M/K199E/ | D60R/K60aM/K60cE/ | CB590 | 43 |
| R290E | R147E | | |
| D196K/K197L | D60K/K60aL | CB610 | 139 |
| D196F/K197L | D60F/K60aL | CB612 | 140 |
| D196L/K197L | D60L/K60aL | CB611 | 141 |
| D196M/K197L | D60M/K60aL | CB613 | 142 |
| D196W/K197L | D60W/K60aL | CB614 | 143 |
| D196F/K197E | D60F/K60aE | CB615 | 144 |
| D196W/K197E | D60W/K60aE | CB616 | 145 |
| D196V/K197E | D60V/K60aE | CB617 | 146 |
| K197E/K341Q | K60aE/K192Q | CB637 | 229 |
| K197L/K341Q | K60aL/K192Q | CB638 | 230 |
| G237V/K341Q | G97V/K192Q | CB670 | 231 |
| K197E/G237V/K341Q | K60aE/G97V/K192Q | CB671 | 235 |
| K197E/K199E | K60aE/K60cE | CB688 | 232 |
| K197E/G237V | K60aE/G97V | CB689 | 233 |
| K199E/K341Q | K60cE/K192Q | CB694 | 234 |
| K197E/K199E/K341Q | K60aE/K60cE/K192Q | CB691 | 250 |

[0250] The FVII polypeptides containing one or more amino acid substitutions at the above-identified residues also can contain additional mutations, such as those described in International Patent Publication No. WO2004/083361, Neuenschwander et al., (1995) Biochemistry 34:8701-8707, Chang et al., (1999) Biochemistry 38:10940-10948, and Iakhiaev et al., (2001) Thromb. Haemost. 85:458-463. Thus, in one embodiment, the FVII polypeptides provided herein can contain one or more amino acid substitutions at one or more amino acid residues of Q176, D196, K197, K199, G237, T239, R290, E296, K341 and Q366, corresponding to amino acid positions of a mature FVII polypeptide as set forth in SEQ ID NO:3. For example, the one or more additional mutations can include, but are not limited to, any one or more of Q176A, D196N, G237L, E296A, K341N, K341Q, K341E, Q366A, Q366E and Q366G.

[0251] b. Antithrombin III (AT-III)

[0252] Antithrombin III (also known as antithrombin or AT-III) is an important anticoagulant serpin (serine protease inhibitor). AT-III is synthesized as a precursor protein containing 464 amino acid residues (SEQ ID NO:122). In the course of secretion a 32 residue signal peptide is cleaved to generate a 432 amino acid mature human antithrombin (SEQ ID NO:123). The 58 kDa AT-III glycoprotein circulates in the blood and functions as a serine protease inhibitor (serpin) to inhibit a large number of serine proteases of the coagulation system. The principal targets of AT-III are thrombin and factor Xa, although AT-III also has been shown to inhibit the activities of FIXa, FXIa, FXIIa and, to a lesser extent, FVIIa. The action of AT-III is greatly enhanced by glycosaminoglycans, such as the naturally occurring heparan sulphate or the various tissue-derived heparins that are widely used as anticoagulants in clinical practice. AT-III binds in a highly specific manner to a unique pentasaccharide sequence in heparin that induces a conformational change in the reactive center loop. In such a conformation, the reactive center loop of AT-III can more efficiently interact with the reactive site of the serine protease, and effect inhibition.

[0253] AT-III is not normally inhibitory to free plasma FVIIa, even in the presence of heparin, likely due to the zymogen-like conformation of FVIIa which prevents efficient interaction with AT-III. The inhibitory effects of AT-III do increase, however, once FVIIa complexes with TF. Binding of AT-III to the TF/FVIIa complex can release FVIIa from TF and maintains it in an inactive complex with AT-III. The increased affinity of AT-III for TF-bound FVIIa compared with FVIIa alone presumably reflects the maturation of the active site of FVIIa when it is complexed with TF, therefore making it amenable to AT-III binding (Rao et al. (1993) Blood 81:2600-2607). Thus, the impact of AT-III on FVIIa is proportional to the intrinsic activity of the FVIIa molecule itself. While FVIIa retains its zymogen-like conformation, AT-III has little effect. If, however, FVIIa changes conformation to a more active form, such as by binding TF, or by specific in vitro modifications, AT-III inhibition increases significantly. FVIIa polypeptides that are modified to have increased intrinsic activity often display simultaneous increases in susceptibility to AT-III inhibition. For example, modification of one or more amino acids in the activation pocket of FVIIa, such as by amino acid replacements corresponding to K337A, L305V, M298Q, VI 58D and E296V substitutions (relative to the mature FVII sequence set forth in SEQ ID NO:3), results in increased sensitivity to of the FVIIa polypeptide to AT-III thereby inhibiting FVIIa activity by up to 90% (Persson et al. (2001) PNAS 98:13583-13588). In another example, induction of a more zymogen-like conformation by modification of amino acids involved in an α-helix of FVIIa, while increasing the activity of the modified FVIIa protein, also increases its susceptibility to AT-III (Persson et al. (2004) Biochem J 379:497-503).

### Modifications to Effect Increased Resistance to AT-III

[0254] Modifications can be made to a FVII polypeptide that increase its resistance to inhibition by AT-III. Generally, such modified FVII polypeptides retain at least one activity of a FVII polypeptide. Typically, such modifications include one or more amino acid substitutions at any position of the FVII polypeptide that are directly involved in the interaction of FVIIa (or the TF/FVIIa complex) with AT-III or in other residues that affect the position or conformation of residues that are directly involved in interactions between FVIIa (or the TF/FVIIa complex) and AT-III. Modified FVII polypeptides that have increased resistance for AT-III can exhibit a reduction in the extent of inhibition under specified conditions or in the second order rate constant for inhibition by AT-III by at least about 1%, 2%, 3%, 4%, 5%, 6%, 7%, 8%, 9%, 10%, 20%, 30%, 40%, 50%, 60%, 70%, 80%, 90%, 100%, 200%, 300%, 400%, 500%, or more compared to the extent of inhibition or the second order rate constant for inhibition of unmodified or wild-type FVII polypeptide either in vivo, ex vivo, or in vitro. The modified FVII polypeptides are therefore resistant to the naturally inhibitory effects of AT-III with respect to coagulation initiation. When evaluated in an appropriate in vitro or ex vivo assay, or in vivo, such as following administration to a subject as a pro-coagulant therapeutic, the modified AT-III-resistant FVII polypeptides display increased coagulant activity as compared with unmodified FVII polypeptides.

[0255] As described herein below, one of skill in the art can empirically or rationally design modified FVII polypeptides that display increased resistance to AT-III. Such modified FVII polypeptides can be tested in assays known to one of skill in the art to determine if such modified FVII polypeptides display increased resistance to AT-III. For example, the second order rate constant of inhibition by AT-III can be measured for such modified FVIIa polypeptides. Generally, a modified FVII polypeptide that has increased resistance to AT-III will exhibit decreased binding under specified conditions (e.g, following injection of a fixed amount of protein into a patient) and/or decreased inhibition by AT-III. Typically, such assays are performed on a two-chain form of FVII, such as the activated form of FVII (FVIIa). Further, assays to determine effects of AT-III are generally performed in the presence of heparin and the presence of tissue factor, although such assays also can be performed in the absence of one or both cofactors.

[0256] Modified FVII polypeptides that have increased resistance for AT-III can exhibit a reduction in the extent of inhibition under specified conditions or in the second order rate constant for inhibition by AT-III by at least about 1%, 2%, 3%, 4%, 5%, 6%, 7%, 8%, 9%, 10%, 20%, 30%, 40%, 50%, 60%, 70%, 80%, 90%, 100%, 200%, 300%, 400%, 500%, or more compared to the extent of inhibition or the second order rate constant for inhibition of unmodified or wild-type FVII polypeptide either in vivo or in vitro. Such resulting modified FVII polypeptides that have increased resistance for AT-III can exhibit a reduction in binding and/or affinity for AT-III by at least about 1%, 2%, 3%, 4%, 5%, 6%, 7%, 8%, 9%, 10%, 20%, 30%, 40%, 50%, 60%, 70%, 80%, 90%, 100%, 200%, 300%, 400%, 500%, or more compared to the binding and/or affinity of unmodified or wild-type FVII polypeptide either in vivo or in vitro. Increased resistance to AT-III by such modified FVII polypeptides also can be manifested as increased coagulation activity in the presence of AT-III. The coagulation activity of the AT-III-modified FVII polypeptides can be increased by at least about 1%, 2%, 3%, 4%, 5%, 6%, 7%, 8%, 9%, 10%, 20%, 30%, 40%, 50%, 60%, 70%, 80%, 90%, 100%, 200%, 300%, 400%, 500%, or more compared to the coagulation activity of unmodified or wild-type FVII polypeptide either in vivo, ex vivo or in vitro.

[0257] 2. Binding to Activated Platelets

[0258] Modifications also can be made to a FVII polypeptide that increase its coagulation activity during TF-dependent and/or TF-independent initiation of coagulation. This proposed mechanism of TF-independent coagulation initiation involves direct activation of FX and FIX by FVIIa (that is not in a complex with TF), which is effected on the surface of an activated platelet. FVIIa binds activated platelets through an interaction between residues in the Gla domain of the FVIIa polypeptide, and phosphatidylserines and other negatively-charged phospholipids expressed on the platelet surface. This interaction is relatively weak, and likely does not play a significant role the initial burst of thrombin production normally observed during coagulation, which is very likely a result of TF-dependent activity. As discussed above, the TF-independent initiation of coagulation and the relatively weak interaction of FVIIa with the platelet surface could account for the requirement for administration of high doses of rFVIIa to achieve efficacy in the clinic. For example, only about 1% of the 10 nM FVII in plasma is present as TF/FVIIa, but the therapeutic dose of rFVIIa is 90 μg/kg or about 50 nM in plasma, far above this level. Thus, high doses of rFVIIa compensate for the low-affinity binding of rFVIIa to activated platelets, resulting in sufficient coagulant activity of the therapeutic during treatment. Thus, of therapeutic interest are modified FVII polypeptides that can be administered at lower dosages due to increased binding and/or affinity for activated platelets, sufficient to effect the initiation of coagulation. Modified FVII polypeptides provided herein are designed to exhibit increased binding and/or affinity for activated platelets through modification of the Gla domain.

[0259] Interaction of residues in the γ-carboxylated Gla domain of vitamin K-dependent plasma proteins, such as FVII, FIX, FX, prothrombin, protein C and protein S, and negatively charged phospholipids on the membrane surface is important for hemostasis. The Gla domains of vitamin K-dependent plasma proteins typically contain approximately 45 amino acids, of which 9 to 12 glutamic acid residues are post-translationally modified by vitamin K-dependent carboxylation to form γ-carboxyglutamate (Gla). The amino acids that form the Gla domain are positioned immediately after those that form the signal peptide and propeptide of the proteins, and are therefore situated at the N-terminus following processing and cleavage of the precursor polypeptides to the mature proteins. For example, the amino acids that form the Gla domain in FVII are at positions 39-83 of the precursor polypeptide set forth in SEQ ID NO:1, positions 61-105 of the precursor polypeptide set forth in SEQ ID NO: 2, and positions 1 to 45 of the mature polypeptide set forth in SEQ ID NO:3. Of these, the 10 glutamic acid residues at positions E6, E7, E14, E19, E20, E25, E26, E29 and E35 of the mature FVII polypeptide set forth in SEQ ID NO: 3 are modified by carboxylation to generate γ-carboxyglutamate (Gla) residues.

[0260] Because glutamic acid is only a weak Ca²⁺ chelator and γ-carboxyglutamate is a much stronger one, this modification step by the vitamin K carboxylase significantly increases the Ca²⁺ binding affinity of the Gla domain of the protein. Calcium also binds the protease domain of FVIIa, where it facilitates conformational changes required for optimal activity. Through binding to sites in both the Gla and the protease domains of FVIIa, calcium enhances binding to TF and phospholipids as well as the catalytic efficiency for activation of FX. The γ-carboxylated Gla domain binds seven Ca²⁺ ions with variable affinity, which induces the conformational change that enables the Gla domain to interact with the C-terminal domain of TF. Ca²⁺ binding also promotes interaction of FVIIa with negatively charged phospholipids on the platelet membrane, the bulk of which are phosphatidylserines. Phosphatidylserine (PS) is a key component in the negatively charged membrane that supports blood coagulation. In most cells, PS is present in the inner leaflet of the cell membrane, and therefore not exposed to plasma. Specific cellular processes, such as activation of platelets, results in translocation of PS to the outer, plasma-oriented surface, presenting a binding site for the Gla domain of vitamin K-dependent proteins (Hemker et al. (1983) Blood Cells 9:303-317).

[0261] In addition to its involvement in the interactions of FVIIa with TF and activated platelets, the Gla domain of FVIIa also is implicated in the binding and activation of FX. This can be through an indirect mechanism, in which the FVIIa Gla domain helps to align Lys¹⁶⁵ and Lys¹⁶⁶ of TF with the Gla domain of FX, an important step in activation of FX to FXa. Alternatively, the Gla domain of FVIIa interacts directly with the Gla domain of FX to correctly align the enzyme and substrate prior to activation (Neuenschwander et al. (1994) J Biol Chem 269:8007-8013, Huang et al. (1996) J Biol Chem 271:21752-21757). The arginine at position 36 of FVIIa has been shown to be important for effective docking of the FX Gla-domain in the absence of phospholipid, demonstrating that the Gla-domain of FVIIa participates in protein-protein interactions with FX (Ruf et al. (1999) Biochemistry 38:1957-1966).

[0262] Although the Gla domains of the different vitamin K-dependent plasma proteins display significant homology, they bind negatively charged phospholipid membranes with very different affinity, with dissociation constants (K_{d}'s) varying by more than 1000-fold. Human FVII displays one of the lowest affinities for phospholipid membranes among these proteins (McDonald et al. (1997) Biochemistry 36:5120-5127). The precise interactions responsible for binding of the Gla domain to PS are not fully understood, although it seems likely that individual amino acid residues within this domain contribute to the different affinities observed. Earlier studies indicated that there was a correlation between amino acids at positions 10, 32 and 33 (relative to the mature FVII protein) and overall membrane affinity (McDonald et al. (1997) Biochemistry 36:5120-5127). Subsequent mutation analysis also has revealed that specific residues contribute to binding affinity. For example, replacement of the histidine at position 10 of the mature form of protein C with a proline resulted in a 3-fold decrease in membrane affinity (Shen et al. (1997) Biochemistry 36:16025-16031). Conversely, mutation of specific residues in the Gla domain of the vitamin K-dependent plasma proteins can produce proteins with higher membrane affinity, and enhanced function. The effects of mutation at certain positions within the Gla domain, however, are not necessarily conserved among the different proteins. For example, mutation of bovine protein C by substitution of Q32E and N33D mediated a large increase in membrane binding, while the corresponding mutations in human protein C showed minimal changes in binding. Analogous mutation of human FVII (K32E) resulting in a 13-fold increase in binding affinity compared with the wild-type FVII protein (Harvey et al. (2003) J Biol Chem 278:8363-8369).

[0263] a. Modification by Introduction of a Heterologous Gla Domain

[0264] Due to its relatively low binding affinity for activated platelets, the Gla domain of FVII is a target for modification, with the aim of enhancing the interaction between the modified FVII and the phospholipid membrane, thereby increasing coagulation activity. Modification can be effected by substitution of specific amino acids that are involved in this interaction (see, e.g., Shah et al. PNAS 95: 4429-4234, Harvey et al. (2003) J Biol Chem 278:8363-8369). Alternatively, modification can be effected by substitution of the entire Gla domain with the Gla domain of another vitamin K-dependent protein i.e. Gla domain swap. This type of modification results in a chimeric protein, such as that which resulted when the Gla domain of protein C was replaced with the Gla domain of FVII (Geng et al. (1997) Thromb Haemost 77:926-933).

[0265] Typically, such modification includes introduction, such as by addition or substitution, of a heterologous Gla domain, or a sufficient portion thereof to effect phospholipids binding into a region of the FVII polypeptide to generate a chimeric modified FVII polypeptide. Generally, such a chimeric FVII polypeptide retains at least one activity of FVII. The binding and/or affinity of Gla-modified FVII polypeptides for activated platelets can be increased by at least about 1%, 2%, 3%, 4%, 5%, 6%, 7%, 8%, 9%, 10%, 20%, 30%, 40%, 50%, 60%, 70%, 80%, 90%, 100%, 200%, 300%, 400%, 500%, or more compared to the binding and/or affinity of unmodified or wild-type FVII polypeptide either in vivo or in vitro. The binding and/or affinity for activated platelets by modified FVII polypeptides also can be manifested as increased coagulation activity. The coagulation activity of the Gla-modified FVII polypeptides can be increased by at least or about 1%, 2%, 3%, 4%, 5%, 6%, 7%, 8%, 9%, 10%, 20%, 30%, 40%, 50%, 60%, 70%, 80%, 90%, 100%, 200%, 300%, 400%, 500%, or more compared to the coagulation activity of unmodified or wild-type FVII polypeptide either in vivo or in vitro.

[0266] A Gla domain, or sufficient portion thereof, contained within any polypeptide can be used as a source of a heterologous Gla domain for introduction or replacement of a region of a FVII polypeptide. Typically, such a heterologous Gla domain exhibits binding affinity for phospholipids, for example, phospholipids present on the surface of an activated platelet. Generally, the choice of a heterologous Gla domain is one which exhibits higher affinity for phospholipids as compared to the affinity of the Gla domain of FVII. The exact Gla domain, or sufficient portion thereof, used as a heterologous domain for modification of a FVII polypeptide can be rationally or empirically determined. Exemplary of other Gla-containing polypeptides include, but are not limited to, FIX, FX, prothrombin, protein C, protein S, osteocalcin, matrix Gla protein, Growth-arrest-specific protein 6 (Gas6), and protein Z. The Gla domains of these exemplary proteins are set forth in any of SEQ ID NOS: 110-118, 120 and 121. For example, 2, 3, 4, 5, 6, 7, 8, 9, 10, 20, 30, 40 or more contiguous amino acids, or the entire Gla domain, of a heterologous Gla domain can be introduced into a FVII polypeptide. In addition, introduction of the Gla domain into a FVII polypeptide also can include additional amino acids not part of the Gla domain of the heterologous polypeptide so long as the additional amino acids do not significantly weaken the phospholipid binding ability of the introduced Gla domain.

[0267] In some examples, the introduction is by addition of the Gla domain to the FVII polypeptide such that the heterologous Gla domain is inserted into the endogenous Gla domain or into another region or domain of the FVII polypeptide so long as the modified FVII polypeptide retains at least one activity of FVII. In such examples, the native Gla domain of the FVII polypeptide is retained in the polypeptide, although in some instances the amino acid sequence that make up the native Gla domain is interrupted. In other examples, the heterologous Gla domain, or a sufficient portion thereof, is inserted adjacent to, either on the N- or C-terminus, of the native Gla domain such that the native Gla domain is not interrupted. In an additional example, the heterologous Gla domain, or a sufficient portion thereof, is inserted into another domain of the FVII polypeptide.

[0268] Also provided herein are modified Gla-domain FVII polypeptides where all or a contiguous portion of the endogenous Gla domain of FVII is removed and is replaced with a heterologous Gla domain, or a sufficient portion thereof to effect phospholipid binding, so long as the modified FVII polypeptide retains at least one activity of FVII. Such modification also is referred to as a Gla domain swap. For example, all or a portion of the Gla domain of FVII, such as is set forth in SEQ ID NO:119, corresponding to amino acids 1-45 of the sequence of amino acids set forth in SEQ ID NO: 3, can be removed from a FVII polypeptide and replaced with a heterologous Gla domain, or a sufficient portion thereof. The heterologous portion includes any Gla domain known to one in the art that binds to phospholipids, including, but not limited to, a Gla domain having the sequence of amino acids set forth in any of SEQ ID NOS: 110-118, 120 and 121. In some cases, a sufficient portion of a Gla domain, such as a sufficient portion of any of SEQ ID NOS: 110-118, 120 and 121 to effect phospholipids binding, can replace the endogenous Gla domain, or a portion of the endogenous Gla domain, of FVII. For example, the Gla domain of FVII can be swapped with the Gla domain of Protein C set forth in SEQ ID NO:113. The resulting modified FVII polypeptide contains a Gla domain from protein C followed by its own EGF-1, EGF-2 and serine protease domain.

[0269] In some examples, the heterologous Gla domain contains mutations that further effect increased binding to activated platelets, due to increased phospholipids binding. For example, if the protein C Gla domain is introduced to generate a modified FVII polypeptide, the protein C Gla domain can contain amino acid mutations that confer increased phospholipid binding.

[0270] In other examples, the heterologous Gla domain can contain further mutations that confer FVII-like functions to the Gla domain. For example, as noted above, R36 of the FVII Gla domain set forth in SEQ ID NO:119 can be involved in interactions with FX. Hence, the heterologous Gla domain can contain further modifications, such as any required to maintain an arginine at position 36 of the mature FVII polypeptide, as set forth in SEQ ID NO:3, or any other modifications required to maintain FX-activation properties of the modified FVIIa polypeptide (Ruf et al. (1999) Biochem 38:1957-1966). Thus, in some examples, a corresponding mutation to R36 can be made in the heterologous Gla domain. The corresponding position can be determined by one of skill in the art, such as by alignment of amino acid sequences.

[0271] As described herein below, one of skill in the art can empirically or rationally design modified FVII polypeptides containing a heterologous Gla domain such that the resulting FVII polypeptide retains at least one FVII activity. Typically, such modified FVII polypeptides retain their ability to bind and activate FX. In some instances, such modified FVII polypeptides also retain their ability to bind and activate FIX. The resulting Gla-modified FVII polypeptides include those that retain their ability to bind to TF. The Gla-swapped modified FVII polypeptides also include those having increased intrinsic activity in the absence of TF. Hence, the resulting Gla-modified FVII polypeptides include those that do not bind TF or that bind TF poorly compared with wild type FVIIa. Typically, such modified FVII polypeptides display increased phospholipid binding. In particular, such modified FVII polypeptides exhibit increased binding to phosphatidylserine. The increased binding to phospholipids can be assayed on isolated phospholipids or on the surface of activated platelets. Such assays are typically performed on a two-chain form of FVII, such as the activated form of FVII (FVIIa).

[0272] Provided herein are modified FVII polypeptides that contain a heterologous Gla domain. Exemplary of such modified FVII polypeptides are those in which the endogenous Gla domain is replaced with all or a portion of the Gla domain of any one of FIX (SEQ ID NO:110), FX (SEQ ID NO:111), thrombin (SEQ ID NO:112), Protein C (SEQ ID NO:113) or Protein S (SEQ ID NO:114). Such modified FVII polypeptides can exhibit increased binding to activated platelets, resulting in increased coagulant activity. Table 8 sets forth exemplary modifications that can be made to a FVII polypeptide to replace the endogenous Gla domain with that of FIX, FX, protein C, protein S or thrombin. The table provides the name of the modification (e.g. Gla Swap FX) and the details of the modification, including the amino acid positions at which the exogenous Gla domain is inserted in the FVII polypeptide, and the sequence of the exogenous Gla domain. The sequence identifier (SEQ ID NO) also is provided in which exemplary amino acid sequences of the modified FVII polypeptide are set forth, and also any polypeptide identification numbers. For example, the “Gla swap FIX” modification (A1Y44delinsYNSGKLEEFVQGNLERECMEEKCSFEEAREVFENTERTTEFWK QY) involves deletion of the endogenous FVII Gla domain by deleting amino acid residues A1 to Y44 (residues corresponding to a mature FVII polypeptide set forth in SEQ ID NO:3) and insertion of 45 amino acid residues that correspond to amino acid residues Y1 to Y45 of the FIX Gla domain set forth in SEQ ID NO:110. Similarly, the Gla Swap FX modification involves deletion of amino acid residues A1 to Y44 (residues corresponding to a mature FVII polypeptide set forth in SEQ ID NO:3) and insertion of 44 amino acid residues that correspond to A1 to Y44 of the FX Gla domain set forth in SEQ ID NO:111. The Gla Swap Thrombin modification involves deletion of amino acid residues A1 to Y44 (residues corresponding to a mature FVII polypeptide set forth in SEQ ID NO:3) and insertion of 44 amino acid residues that correspond to amino acid residues Y1 to Y44 of the Thrombin Gla domain set forth in SEQ ID NO:112. The Gla Swap Protein C modification involves deletion of amino acid residues A1 to Y44 (residues corresponding to a mature FVII polypeptide set forth in SEQ ID NO:3) and insertion of 44 amino acid residues that correspond to amino acid residues A1 to H44 of the Protein C Gla domain set forth in SEQ ID NO:113. The Gla Swap Protein S modification involves deletion of amino acid residues A1 to Y44 (residues corresponding to a mature FVII polypeptide set forth in SEQ ID NO:3) and insertion of 44 amino acid residues that correspond to amino acid residues Y1 to Y44 of the Protein S Gla domain set forth in SEQ ID NO:114.

TABLE 8

| | Modification - | Modification - | Poly | SEQ |
|---|---|---|---|---|
| Modification | mature FVII | chymotrypsin | peptide | ID |
| name | Numbering | numbering | ID No. | NO |
| Gla swap FIX | A1Y44delinsYNSGKLEEFVQ | A[1]Y[44]delinsYNSGKLEEF | CB728 | 236 |
| | GNLERECMEEKCSFEEARE | VQGNLERECMEEKCSFEEA | | |
| | VFENTERTTEFWKQY | REVFENTERTTEFWKQY | | |
| Gla swap FX | A1Y44delinsANSFLEEMKKG | A[1]Y[44]delinsANSFLEEMK | CB729 | 237 |
| | HLERECMEETCSYEEAREV | KGHLERECMEETCSYEEAR | | |
| | FEDSDKTNEFWNKY | EVFEDSDKTNEFWNKY | | |
| Gla Swap | A1Y44delinsANSFLEELRHSS | A[1]Y[44]delinsANSFLEELR | CB730 | 238 |
| Prot C | LERECIEEICDFEEAKEIFQN | HSSLERECIEEICDFEEAKEI | | |
| | VDDTLALFWSKH | FQNVDDTLAFWSKH | | |
| Gla Swap | A1Y44delinsANSLLEETKQG | A[1]Y[44]delinsANSLLEETK | CB731 | 239 |
| Prot S | NLERECIEELCNKEEAREVF | QGNLERECIEELCNKEEARE | | |
| | ENDPETDYFYPKY | VFENDPETDYFYPKY | | |
| Gla swap | A1Y44delinsANTFLEEVRKG | A[1]Y[44]delinsANTFLEEVR | CB732 | 240 |
| Thrombin | NLERECVEETCSYEEALFEAL | KGNLERECVEETCSYEEAF | | |
| | ESSTATDVFWAKY | EALESSTATDVFWAKY | | |

[0273] Modified FVII polypeptides containing a heterologous Gla domain can exhibit increased coagulant activity at lower dosages as compared to a wild-type FVII molecule, such as NovoSeven®, due to increased binding and/or affinity for activated platelets. The coagulation activity of the Gla-modified FVII polypeptides can be increased by at least or about 1%, 2%, 3%, 4%, 5%, 6%, 7%, 8%, 9%, 10%, 20%, 30%, 40%, 50%, 60%, 70%, 80%, 90%, 100%, 200%, 300%, 400%, 500%, or more compared to the coagulation activity of unmodified or wild-type FVII polypeptide either in vivo, ex vivo or in vitro.

[0274] 3. Combinations and Additional Modifications

[0275] In addition to modification of FVII polypeptides to have increased TFPI-resistance, increased resistance to AT-III, increased TF-dependent and/or TF-independent catalytic activity, improved pharmacokinetic properties, such as increased half-life, and/or increased binding and/or affinity for phospholipid membranes, modified FVII polypeptides provided herein also include those that exhibit more than one of the above-noted properties. For example, a FVII polypeptide can be modified such that the resulting polypeptide displays increased binding and/or affinity for phospholipids and also displays increased resistance to TFPI. Accordingly, a FVII polypeptide can be modified by introduction of a heterologous Gla domain from another vitamin K-dependent plasma protein and by substitution of any one or more of the amino acids at positions 196, 197, 199, 237, 239, 290 or 341 relative to the mature FVII polypeptide set forth in SEQ ID NO:3.

[0276] Further, any modified FVII polypeptide provided herein also can contain one or more other modifications described in the art. Typically, such additional modifications are those that themselves result in an increased coagulant activity of the modified polypeptide and/or and increased stability of the polypeptide. Accordingly, the resulting modified FVII polypeptides exhibit an increased coagulant activity. The additional modifications can include, for example, any amino acid substitution, deletion or insertion known in the art, typically any that increases the coagulant activity and/or stability of the FVII polypeptide. Any modified FVII polypeptide provided herein can contain 1, 2, 3, 4, 5, 6, 7, 8, 9, 10, 11, 12, 13, 14, 15, 16, 17, 18, 19, 20 or more additional amino acid modifications, so long as the resulting modified FVII polypeptide retains a FVII activity of the wild-type or unmodified polypeptide.

[0277] In one example, the additional modification can be made to the FVII polypeptide sequence such that its interaction with other factors, molecules and proteins is altered. For example, the amino acid residues that are involved in the interaction with tissue factor (TF) can be replaced such that the affinity of the modified FVII polypeptide for TF is increased. Other modifications include, but are not limited to, modification of amino acids that are involved in interactions with factor X, factor IX, TFPI and AT-III.

[0278] Additional modifications also can be made to a modified FVII polypeptide provided herein that alter the conformation or folding of the polypeptide. These include, for example, the replacement of one or more amino acids with a cysteine such that a new disulphide bond is formed, or modifications that stabilize an α-helix conformation, thereby imparting increased activity to the modified FVII polypeptide.

[0279] Additional modifications also can be made to the FVII polypeptide to effect post-translational modifications. For example, the polypeptide can be modified to include additional glycosylation sites such that the resulting modified FVII polypeptide has increased glycosylation compared to an unmodified FVII polypeptide. Modifications also can be made to introduce amino acid residues that can be subsequently linked to a chemical moiety, such as one that acts to increase stability of the modified FVII polypeptide. A FVII polypeptide can also be altered by modifying potential cleavage site(s) for endogeneous proteases, thereby decreasing degradation of the FVIIa variant and increasing the stability of the modified FVII polypeptide.

[0280] Additionally, amino acids substitutions, deletions or insertions can be made in the endogenous or heterologous Gla domain such that the modified FVII polypeptide displays increased binding and/or affinity for phospholipid membranes. In other examples, the modified FVII polypeptides provided herein can display deletions in the endogenous Gla domain, or substitutions in the positions that are normally gamma-carboxylated (US20070037746).

[0281] The following sections describe non-limiting examples of exemplary modifications described in the art to effect increased stability and/or coagulant activity of a FVII polypeptide. As discussed above, such modifications also can be additionally included in any modified FVII polypeptide provided herein. The amino acid positions referenced below correspond to the mature FVII polypeptide as set forth in SEQ ID NO:3. Corresponding mutations can be made in other FVII polypeptides, such as allelic, species or splices variants of the mature FVII polypeptide set forth in SEQ ID NO:3.

[0282] a. Modifications that Increase Intrinsic Activity

[0283] In one example, additional modifications can be made to a modified factor VII polypeptide provided herein that result in increased catalytic activity toward factor X and/or Factor IX. For example, modifications can be made to the amino acids that are involved in the interaction with its cofactor, TF, such that the resulting modified FVII polypeptide has increased affinity for TF, and thereby displays increased activity toward FX and/or FIX. Modifications also can be made to the activation pocket of the FVII polypeptide, such that the intrinsic activity of the modified FVII polypeptide toward FX and/or FIX is increased compared to the activity of the unmodified polypeptide. Another modification strategy that results in increased activity involves modification of the FVII polypeptide such that the folding and conformation of the protein is altered to a more active form or an equilibrium between highly active and inactive (or less active) conformations is shifted in favor of the highly active conformation(s). A more active polypeptide also can be achieved by modification of the amino acids involved in the β-strands of the FVII polypeptide. For example, amino acid substitutions can be made that introduce new cysteine pairs that can form new disulphide bonds which can function to “lock” the modified FVII polypeptide into a more active form.

[0284] Examples of additional modifications that can be included in the modified FVII polypeptides provided herein to increase the intrinsic activity of the modified FVII polypeptide include, but are not limited to, those described in Persson et al. (2004) Biochem J. 379:497-503, Maun et al. (2005) Prot Sci 14:1171-1180, Persson et al. (2001) PNAS 98:13583-13588, Persson et al. (2002) Eur J Biochem 269:5950-5955, Soejima et al. (2001) J Biol Chem 276:17229-17235, Soejima et al. (2002) J Biol Chem 277:49027-49035, WO200183725, WO2002022776, WO2002038162, WO2003027147, WO200338162, WO2004029090, WO2004029091, WO2004108763 and WO2004111242. Non-limiting examples of exemplary amino acid modifications described in the art that can result in increased intrinsic activity of the modified FVII polypeptide include any one or more of S278C/V302C, L279C/N301C, V280C/V301C, S281C/V299C, S314E, L39E, L39Q, L39H, I42R, S43Q, S53N, K62E, K62R, K62D, K62N, K62Q, K62T, L65Q, L65S, F71D, F71Y, F71E, F71Q, F71N, P74S, P74A, A75E, A75D, E77A, E82Q, E82N, T83K, E116D, K157V, K157L, K157I, K157M, K157F, K157W, K157P, K157G, K157S, K157T, K157C, K157Y, K157N, K157E, K157R, K157H, K157D, K157Q, V158L, V158I, V158M, V158F, V158W, V158P, V158G, V158S, V158T, V158C, V158Y, V158N, V158E, V158R, V158K, V158H, V158D, V158Q, A274M, A274L, A274K, A274R, A274D, A274V, A274I, A274F, A274W, A274P, A274G, A274T, A274C, A274Y, A274N, A274E, A274H, A274S, A274Q, F275H, E296V, E296L, E296I, E296M, E296F, E296W, E296P, E296G, E296S, E296T, E296C, E296Y, E296N, E296K, E296R, E296H, E296D, E296Q, M298Q, M298V, M298L, M298I, M298F, M298W, M298P, M298G, M298S, M298T, M298C, M298Y, M298N, M298K, M298R, M298H, M298E, M298D, R304Y, R304F, R304L, R304M, L305V, L305Y, L305I, L305F, L305A, L305M, L305W, L305P, L305G, L305S, L305T, L305C, L305N, L305E, L305K, L305R, L305H, L305D, L305Q, M306D, M306N, D309S, D309T, S314A, S314V, S314I, S314M, S314F, S314W, S314P, S314G, S314L, S314T, S314C, S314Y, S314N, S314E, S314K, S314R, S314H, S314D, S314Q, D334G, D334E, D334A, D334V, D334I, D334M, D334F, D334W, D334P, D334L, D334T, D334C, D334Y, D334N, D334K, D334R, D334H, D334S, D334Q, S336G, S336E, S336A, S336V, S336I, S336M, S336F, S336W, S336P, S336L, S336T, S336C, S336Y, S336N, S336K, S336R, S336H, S336D, S336Q, K337L, K337V, K337I, K337M, K337F, K337W, K337P, K337G, K337S, K337T, K337C, K337Y, K337N, K337E, K337R, K337H, K337D, K337Q, F374P, F374A, F374V, F374I, F374L, F374M, F374W, F374G, F374S, F374T, F374C, F374Y, F374N, F374E, F374K, F374R, F374H, F374D, F374Q, and substitution of positions 300-322, 305-322, 300-312, or 305-312 with the corresponding amino acids from trypsin, thrombin or FX, and substitution of positions 310-329, 311-322 or 233-329 with the corresponding amino acids from trypsin.

[0285] b. Modifications that Increase Resistance to Proteases

[0286] Modified FVII polypeptides provided herein also can contain additional modifications that result in increased resistance of the polypeptide to proteases. For example, amino acid substitutions can be made that remove one or more potential proteolytic cleavage sites. The modified FVII polypeptides can thus be made more resistant to proteases, thereby increasing the stability and half-life of the modified polypeptide.

[0287] Examples of additional modifications that can be included in the modified FVII polypeptides provided herein to increase resistance to proteases include, but are not limited to, those described in U.S. Pat. No. 5,580,560 or International Published Application Nos. WO1988010295 and WO2002038162. Non-limiting examples of exemplary modifications described in the art that can result in increased resistance of the modified FVII polypeptide to inhibitors and/or proteases include any one or more of; K32Q, K32E, K32G, K32H, K32T, K32A, K32S, K38T, K38D, K38L, K38G, K38A, K38S, K38N, K38H, I42N, I42S, I42A, I42Q, Y44N, Y44S, Y44A, Y44Q, F278S, F278A. F278N, F278Q, F278G, R290G, R290A, R290S, R290T, R290K, R304G, R304T, R304A, R304S, R304N, R315G, R315A, R315S, R315T, R315Q, Y332S, Y332A, Y332N, Y332Q, Y332G, K341E, K341Q, K341G, K341T, K341A and K341S.

[0288] c. Modifications that Increase Affinity for Phospholipids

[0289] The coagulant activity of FVII can be enhanced by increasing the binding and/or affinity of the polypeptide for phospholipids, such as those expressed on the surface of activated platelets. For example, additional amino acid substitutions can be made at particular positions in the endogenous Gla domain of a FVII polypeptide that result in a modified FVII polypeptide with increased ability to bind phosphatidylserine and other negatively charged phospholipids. Thus, such modifications also can be included in a modified FVII polypeptide provided herein, provided the such modified FVII polypeptides possess an endogenous Gla domain, i.e. have not already been subjected to modification resulting in substitution of the endogenous Gla domain with that of another vitamin K-dependent protein.

[0290] Examples of additional modifications to increase phospholipid binding and/or affinity and that can be made to a modified FVII polypeptide provided herein that contains an endogenous FVII Gla domain, include, but are not limited to, those described in Harvey et al. (2003) J Biol Chem 278:8363-8369, US20030100506, US20040220106, US20060240526, U.S. Pat. No. 6,017,882, U.S. Pat. No. 6,693,075, U.S. Pat. No. 6,762,286, WO200393465 and WO2004111242. Exemplary of such modifications include any one or more of, an insertion of a tyrosine at position 4, or modification of any one or more of P10Q, P10E, P10D, P10N, R28F, R28E, K32E, K32D, D33F, D33E, D33K A34E, A34D, A34I, A34L, A34M, A34V, A34F, A34W, A34Y, R36D, R36E, K38E and K38D.

[0291] d. Modifications that Alter Glycosylation

[0292] Alteration of the glycosylation levels of a protein has been described in the art as a means to reduce immunogenicity, increase stability, reduce the frequency of administration and/or reduce adverse side effects such as inflammation. Normally, this is effected by increasing the glycosylation levels. The glycosylation site(s) provides a site for attachment for a carbohydrate moiety on the polypeptide, such that when the polypeptide is produced in a eukaryotic cell capable of glycosylation, it is glycosylated.

[0293] There are four naturally occurring glycosylation sites in FVII; two N-glycosylation sites at N145 and N322, and two O-glycosylation sites at S52 and S60, corresponding to amino acid positions in the mature FVII polypeptide set forth in SEQ ID NO:3. In one embodiment, additional modifications can be made to a modified FVII polypeptide provided herein such that glycosylation at the above sites is disrupted. This can result in a modified FVII polypeptide with increased coagulant activity (see, e.g., WO2005123916). Non-limiting examples of exemplary modifications described in the art that can result in decreased glycosylation and increased activity of the modified FVII polypeptide as compared to an unmodified FVII polypeptide include, but are not limited to; N145Y, N145G, N145F, N145M, N145S, N145I, N145L, N145T, N145V, N145P, N145K, N145H, N145Q, N145E, N145R, N145W, N145D, N145C, N322Y, N322G, N322F, N322M, N322S, N322I, N322L, N322T, N322V, N322P, N322K, N322H, N322Q, N322E, N322R, N322W and N322C.

[0294] In another embodiment, further modifications can be made to the amino acid sequence of the modified FVII polypeptides provided herein such that additional glycosylation sites are introduced, thus increasing the level of glycosylation of the modified FVII polypeptide as compared to an unmodified FVII polypeptide. The glycosylation site can be an N-linked or O-linked glycosylation site. Examples of modifications that can be made to a FVII polypeptide that introduce one or more new glycosylation sites include, but are not limited to, those that are described in U.S. Pat. No. 6,806,063 and WO200393465. Non-limiting examples of exemplary modifications described in the art that can result in increased glycosylation of the modified FVII polypeptide as compared to an unmodified FVII polypeptide include, but are not limited to; F4S, F4T, P10N, Q21N, W41N, S43N, A51N, G58N, L65N, G59S, G59T, E82S, E82T, N95S, N95T, G97S, G97T, Y101N, D104N, T106N, K109N, G117N, G124N, S126N, T128N, A175S, A175T, G179N, I186S, I186T, V188N, R202S, R202T, I205S, I205T, D212N, E220N, I230N, P231N, P236N, G237N, V253N, E265N, T267N, E270N, R277N, L280N, G291N, P303S, P303ST, L305N, Q312N, G318N, G331N, D334N, K337N, G342N, H348N, R353N, Y357N, 1361N, V376N, R379N, M391N, K32N/A34S, K32N/A34T, F31N/D33S, F31N/D33T, 130N/K32S, 130N/K32T, A34N/R36S, A34N/R36T, K38N/F40S, K38N/F40T, T37N/L39S, T37N/L39T, R36N/K38S, R36N/K38T, L39N/W41S, L39N/W41T, F40N/142S, F40N/142T, I42N/Y44S, I42N/Y44T, Y44N/D46S, Y44N/D46T, D46N/D48S, D46N/D48T, G47N/Q49S, G47N/Q49T, K143N/N145S, K143N/N145T, E142N/R144S, E142N/R144T, L141N/K143S, L141N/K143T, I140N/E142S/, I140N/E142T, R144N/A146S, R144N/A146T, A146N/K148S, A146N/K148T, S147N/P149S/, S147N/P149T, R290N/A292S, R290N/A292T, D289N/G291S, D289N/G291T, L288N/R290S, L288N/R290T, L287N/D289S, L287N/D289, A292N/A294S, A292N/A294T, T293N/L295S, T293N/L295T, R315N/V317S, R315N/V317T, S314N/K316S, S314N/K316T, Q313N/R315S, Q313N/R315T, K316N/G318S, K316N/G318T, V317N/D319S, V317N/D319T, K341N/D343S, K341N/D343T, S339N/K341S, S339N/K341T, D343N/G345S, D343N/G345T, R392N/E394S, R392N/E394T, L390N/R392S, L390N/R392T, K389N/M391S, K389N/M391T, S393N/P395S, S393N/P395T, E394N/R396S, E394N/R396T, P395N/P397S, P395N/P397T, R396N/G398S, R396N/G398T, P397N/V399S, P397N/V399T, G398N/L400S, G398N/L400T, V399N/L401S, V399N/L401T, L400N/R402S, L400N/R402T, L401N/A403S, L401N/A403T, R402N/P404S, R402N/P404T, A403N/F405S, A403N/F405T, P404N/P406S and P404N/P406T.

[0295] e. Modifications to Facilitate Chemical Group Linkage

[0296] Additional modifications of a modified FVII polypeptide provided herein also can be made to facilitate subsequent linkage of a chemical group. One or more amino acid substitutions or insertions can be made such that a chemical group can be linked to a modified FVII polypeptide via the substituted amino acid. For example, a cysteine can be introduced to a modified FVII polypeptide, to which a polyethylene glycol (PEG) moiety can be linked to confer increased stability and serum half-life. Other attachment residues include lysine, aspartic acid and glutamic acid residues. In some embodiments, amino acids residues are replaced to reduce the number of potential linkage positions. For example, the number of lysines can be reduced. Examples of modifications that can be made to the amino acid sequence of a FVII polypeptide which can facilitate subsequent linkage with a chemical group include, but are not limited to, those that are described in US20030096338, US20060019336, U.S. Pat. No. 6,806,063, WO200158935 and WO2002077218. Non-limiting examples of exemplary modifications of a FVII polypeptides that can facilitate subsequent linkage with a chemical group include, but are not limited to; Q250C, R396C, P406C, I42K, Y44K, L288K, D289K, R290K, G291K, A292K, T293K, Q313K, S314K, R315K, V317K, L390K, M391K, R392K, S393K, E394K, P395K, R396K, P397K, G398K, V399K, L400K, L401K, R402K, A403K, P404K, F405K, I30C, K32C, D33C, A34C, T37C, K38C, W41C, Y44C, S45C, D46C, L141C, E142C, K143C, R144C, L288C, D289C, R290C, G291C, A292C, S314C, R315C, K316C, V317C, L390C, M391C, R392C, S393C, E394C, P395C, R396C, P397C, G398C, V399C, L401C, R402C, A403C, P404C, I30D, K32D, A34D, T37D, K38D, W41D, Y44D, S45D, D46C, L141D, E142D, K143D, R144D, L288D, R290D, G291D, A292D, Q313D, S314D, R315D, K316D, V317D, L390D, M391D, R392D, S393D, P395D, R396D, P397D, G398D, V399D, L401D, R402D, A403D, P404D, I30E, K32E, A34E, T37E, K38E, W41E, Y44E, S45E, D46C, L141E, E142E, K143E, R144E, L288E, R290E, G291E, A292E, Q313E, S314E, R315E, K316E, V317E, L390E, M391E, R392E, S393E, P395E, R396E, P397E, G398E, V399E, L401E, R402E, A403E, P404E, K18R, K32R, K38R, K62R, K85R, K109R, K137R, K143R, K148R, K157R, K161R, K197R, K199R, K316R, K337R, K341R, K389R, K18Q, K32Q, K38Q, K62Q, K85Q, K109Q, K137Q, K143Q, K148Q, K157Q, K161Q, K197Q, K199Q, K316Q, K337Q, K341Q, K389Q, K18N, K32N, K38N, K62N, K85N, K109N, K137N, K143N, K148N, K157N, K161N, K197N, K199N, K316N, K337N, K341N, K389N, K18H, K32H, K38H, K62H, K85H, K109H, K137H, K143H, K148H, K157H, K161H, K197H, K199H, K316H, K337H, K341H and K389H.

[0297] f. Exemplary Combination Modifications

[0298] Provided herein are modified FVII polypeptides that have two or more modifications designed to affect one or more properties or activities of an unmodified FVII polypeptide. In some examples, the two or more modifications alter two or more properties or activities of the FVII polypeptide. The modifications can be made to the FVII polypeptides such that one or more of resistance to TFPI, resistance to AT-III, intrinsic activity, amidolytic activity, catalytic activity (in the presence or absence of TF), phospholipid binding and/or affinity, glycosylation, resistance to proteases, half-life and interaction with and/or activation of other factors or molecules, such as FX and FIX, is altered. Typically, the two or more modifications are combined such that the resulting modified FVII polypeptide has increased coagulant activity, increased duration of coagulant activity, and/or an enhanced therapeutic index compared to an unmodified FVII polypeptide. The modified FVIIa polypeptide may exhibit a faster onset of coagulant activity either in vitro, ex vivo, or in vivo. The modifications can include amino acid substitution, insertion or deletion. The increased coagulant activity, increased duration of coagulant activity, increased onset of coagulant activity, and/or an enhanced therapeutic index of the modified FVII polypeptide containing two or more modifications can be increased by at least or about 1%, 2%, 3%, 4%, 5%, 6%, 7%, 8%, 9%, 10%, 20%, 30%, 40%, 50%, 60%, 70%, 80%, 90%, 100%, 110%, 120%, 130%, 140%, 150%, 160%, 170%, 180%, 190%, 200%, 300%, 400%, 500%, or more compared to the activity of the starting or unmodified FVIIa polypeptide.

[0299] Provided herein are modified FVII polypeptides that contain two or more modifications that are introduced into an unmodified FVII polypeptide to alter two or more activities or properties. The modified FVII polypeptides can contain 2, 3, 4, 5, 6 or more modifications. Further, each modification can involve one or more amino acid residues. For example, a modified FVII polypeptide can contain two modifications each of which is a single amino acid substitution. In another example, a modified FVII polypeptide can contain two modifications, one of which is a single amino acid substitution and the other of which involves deletion of more than one amino acid residue and then insertion of more than one amino acid residue. For example, a modified FVII polypeptide provided herein can contain the amino acid substitution M298Q (residues corresponding to a mature FVII polypeptide set forth in SEQ ID NO:3) to increase intrinsic activity and a Gla Swap FIX modification, which involves deletion of the endogenous FVII Gla domain by deleting amino acid residues A1 to Y44 (residues corresponding to a mature FVII polypeptide set forth in SEQ ID NO:3) and insertion of 45 amino acid residues that correspond to amino acid residues Y1 to Y45 of the FIX Gla domain set forth in SEQ ID NO:110.

[0300] Modified FVII polypeptides provided herein can have two or more modifications selected solely from those set forth in Tables 5 to 8. In other examples, the modified FVII polypeptide contains two or more modifications where one or more modifications are selected from those set forth in Tables 5 to 8 and one or more modifications are additional modifications that are not set forth in Tables 5 to 8, such as, for example, modifications described in the art. In some examples, the one or more additional modifications can be selected from those set forth in Section D.6.a-e, above. For example, a modified FVII polypeptide can contain a modification at one or more of amino acid residues D196, K197, K199, G237, T239, R290 or K341 based on numbering of a mature FVII set forth in SEQ ID NO:3 (corresponding to D60, K60a, K60c, G97, T99, R147 and K192, respectively, based on chymotrypsin numbering), which can increase resistance to TFPI, and a modification at one or more amino acid residues that affects intrinsic activity, such as, for example, V158 and M298, (V21 and M156, respectively, based on chymotrypsin numbering). For example, a modified FVII polypeptide can contain two amino acid substitutions that increase resistance to TFPI, such as K197E and G237V, and one amino acid substitution that increases intrinsic activity, such as M298Q, resulting in a FVII polypeptide with increased coagulant activity.

[0301] Non-limiting exemplary combination modifications are provided in Table 9. These exemplary combination modifications include two or more modifications that are designed to alter two or more activities or properties of a FVII polypeptide, including, but not limited to, resistance to TFPI, resistance to AT-III, intrinsic activity, amidolytic activity, catalytic activity (in the presence and/or absence of TF), phospholipid binding and/or affinity, glycosylation, resistance to proteases, half-life and interaction with and/or activation of other factors or molecules, such as FX and FIX. Modified FVII polypeptides containing such combination modifications can have increased coagulant activity, increased duration of coagulant activity, increased onset of coagulant activity and/or an enhanced therapeutic index. The modifications set forth in Table 9 below use the same nomenclature and numbering systems as described in Tables 5 to 8, above. For example, the “Gla Swap FIX” modification involves deletion of the endogenous FVII Gla domain by deleting amino acid residues A1 to Y44 (residues corresponding to a mature FVII polypeptide set forth in SEQ ID NO:3) and insertion of 45 amino acid residues that correspond to amino acid residues Y1 to Y45 of the FIX Gla domain set forth in SEQ ID NO:110, as described above. Amino acid positions correspond to amino acid positions of a mature FVII polypeptide as set forth in SEQ ID NO:3 and also are referred to by the chymotrypsin numbering scheme. In Table 9 below, the sequence identifier (SEQ ID NO) is identified in which exemplary amino acid sequences of the modified FVII polypeptide are set forth, and also any polypeptide identification numbers.

TABLE 9

| Modification - mature FVII | Modification - chymotrypsin | Polypeptide | SEQ ID |
|---|---|---|---|
| numbering | numbering | ID No. | NO |
| V158D/G237V/E296V/M298Q | V21D/G97V/E154V/M156Q | CB669 | 241 |
| K197E/G237V/M298Q | K60aE/G97V/M156Q | CB690 | 242 |
| K197E/G237V/M298Q/K341Q | K60aE/G97V/M156Q/K192Q | CB692 | 243 |
| K197E/K199E/G237V/M298Q/ | K60aE/K60cE/G97V/M156Q/ | CB693 | 244 |
| K341Q | K192Q | | |
| G237V/M298Q | G97V/M156Q | CB695 | 245 |
| G237V/M298Q/K341Q | G97V/M156Q/K192Q | CB696 | 246 |
| M298Q/Gla Swap FIX | M156Q/Gla Swap FIX | CB850 | 247 |
| K197E/M298Q | K60aE/M156Q | CB902 | 248 |
| M298Q/K341D | M156Q/K192D | CB945 | 249 |

### E. Design and Methods for Modifying FVII

[0302] Provided herein are modified FVII polypeptides. The FVII polypeptides are modified such that they can exhibit alterations in one or more activities or properties compared to an unmodified FVII polypeptide. Activities and properties that can be altered as a result of modification include, but are not limited to, coagulation or coagulant activity; pro-coaguant activity; proteolytic or catalytic activity such as activity that effects factor X (FX) activation or Factor IX (FIX) activation; antigenicity, such as that assessed by the ability to bind to or compete with a polypeptide for binding to an anti-FVII antibody; ability to bind tissue factor, factor X or factor IX; ability to bind to phospholipids; half-life; three-dimensional structure; pI; and/or conformation. Among the modified FVII polypeptides provided herein are those that have increased coagulant activity. Among these are those whose increase in coagulant activity results from or involves increased resistance of the modified FVII to TFPI, increased resistance to AT-III, improved pharmacokinetic properties, such as increased half-life, increased catalytic activity, and/or increased binding to activated platelets. Exemplary methods to identify such modified FVII polypeptides and the modified polypeptides are provided herein. For example, a modified FVII polypeptides that exhibits increased resistance to TFPI, increased resistance to AT-III and/or increased binding to activated platelets can be generated rationally or empirically by: (a) rationally targeting sites that are contemplated to be involved in such properties or, (b) empirically testing modified FVII polypeptides in functional assays for resistance to TFPI, resistance to AT-III, improved pharmacokinetic properties, such as increased half-life, and/or increased binding to phospholipids or activated platelets. In many cases, a combination of rational and empirical design approaches can be used to generate modified FVII polypeptides

[0303] Once a domain, region or amino acid is identified for modification using a rational or empirical approach, any method known in the art to effect mutation of any one or more amino acids in a target protein can be employed. Methods include standard site-directed mutagenesis (using e.g., a kit, such as kit such as QuikChange available from Stratagene) of encoding nucleic acid molecules, or by solid phase polypeptide synthesis methods. In addition, modified chimeric proteins provided herein (i.e. Gla domain swap) can be generated by routine recombinant DNA techniques. For example, chimeric polypeptides can be generated using restriction enzymes and cloning methodologies for routine subcloning of the desired chimeric polypeptide components. Once identified and generated, modified FVII polypeptides can then be assessed for activity, such as catalytic activity or coagulant activity, using any one or more of the various assays known in the art or described herein below.

[0304] 1. Rational

[0305] In some examples, modified FVII polypeptides provided herein are designed by rational modification to increase coagulant activity. In such a method, the domains, regions or amino acids responsible for activity of a FVII polypeptide are known or can be rationally determined. For example, various databases in the public domain provide sequence and domain information related to wild-type FVII (see, e.g., the ExPASy Proteomics server ca.expasy.org). Other information in the public domain can be accessed to determine the amino acids, regions and/or domains in a FVII polypeptide that are involved in a specific interaction or activity. Such sources include, for example, scientific journals, sequence and function databases, or patent databases. In some instances, direct evidence can be used to determine the influence of one or more amino acids on a given interaction or activity. In other examples, this is extrapolated indirectly from, for example, evidence or information regarding related proteins that display similar activities and/or interactions. In such examples, those amino acids that are responsible for the activity or interaction in the related protein can be used to determine which are the corresponding amino acids in the FVII polypeptide by alignment of the related polypeptide with the FVII polypeptide, based on sequence and/or structural similarities. Thus, the amino acids in the FVII polypeptide that are likely to be involved in the given activity or interaction can be determined. In addition, homology modeling can be used to predict residues that play important roles in the formation and/or stabilization of protein/protein interactions, and this information can be used to design variants with improved properties.

[0306] Once the domains, regions and/or amino acids responsible for activity of a FVII polypeptide are determined, they can be modified such that the modifications are predicted to result in increased coagulant activity of the polypeptide. This can be effected in several ways depending upon the activity or interaction being targeted. In some examples, one or more amino acid substitutions, insertions or deletions can be made that increase the affinity of the modified FVII for other proteins or molecules.

[0307] In one example, modifications can be made to any domain, region or amino acid(s) such that the affinity or interaction of the modified FVII for other proteins is altered, i.e. increased or decreased depending on the target interaction to be modified. To effect such a modification, the domains, regions and/or amino acids involved or contemplated to be involved in such interaction are known or can be rationally determined. For example, a modified FVII can be rationally designed to have a decreased interaction with an inhibitory protein, such as TFPI or AT-III, so as to increase the coagulant activity of the modified FVII polypeptide. A method of rationally designing a FVII polypeptide to have a decreased interaction with TFPI is set forth in Example 1. Similar approaches can be performed to increase or decrease the interaction of FVII with any other polypeptide for which FVII is known to interact or bind.

[0308] For example, FVII was modified to display increased resistance to TFPI. TFPI, in a complex with FXa, binds to the TF/FVIIa complex to form a quaternary complex in which the catalytic activity of FVIIa is inhibited. The first Kunitz domain of TFPI-1 (TFPI-1 K1) is the domain that is responsible for the interaction with, and inhibition of, FVIIa. Identification of the FVII amino acid residues that are involved in this interaction can facilitate the design of FVII polypeptides that are resistant to TFPI. Various approaches can be used to determine which of the amino acid residues in FVII are involved in this interaction, including, but not limited to, mutagenesis, scanning approaches, and rational design such as computer modeling. The crystal structure of FVIIa in complex with TFPI can be used as a basis for determining contact residues. Alternatively, and as described in Example 1, where a crystal structure is unavailable, computer modeling can be generated through a series of alignments and extrapolations from known structures and sequences of related proteins and their interactions with each other.

[0309] The results of the computer modeling can be used to identify residues that are directly involved in contact with a desired target protein, such as for example, TFPI, and/or those residues that are indirectly involved in the interaction, for example, due to close proximity to contact residues. For example, using the computer modeling results as set forth in Example 1, an alignment of the TFPI-1 and TFPI-2 first Kunitz domains was made to determine which are the corresponding “contact” residues in TFPI-1 (FIG. 5b). Replacement amino acids can be identified in order to alter the interaction of the FVII polypeptide with the target protein. The replacement amino acids can be up to all 19 other naturally occurring amino acids, as well as “unnatural” amino acids. Alternatively, such replacement amino acids can be identified by in silico mutagenesis based on rational assumptions of the interaction. Example 1 sets forth an in silico approach for the identification of replacement amino acids whereby analysis of the computer model revealed residues involved in electrostatic complementarity between Factor VII and TFPI-1 K1. For example, the negatively-charged D60 of FVII (by chymotrypsin numbering) appears to be involved in an electrostatic interaction with the positively-charged R20 of TFPI-1. This residue is therefore a candidate for mutagenesis such the electrostatic complementarity with R20 of TFPI is abolished, thereby generating a modified FVII polypeptide that has increased resistance to TFPI. This can be effected by charge-reversal or charge neutralization substitutions. For example, an amino acid substitution can be made to replace the negatively-charged aspartic acid with a positively-charged lysine. Such a charge-reversal substitution establishes a repulsive charge-charge interaction at this site, and interferes with the binding and interaction of TFPI with FVIIa. In another example, the negatively-charged D60 of FVII can be replaced with a basic arginine to negate the positive electrostatic complementarity with R20 of TFPI and introduce an unfavorable interaction. Such rationally-designed modifications can be made to one or more of the FVII residues that are determined to be involved in direct or indirect contact and interaction with residues of TFPI.

[0310] In another example, rational modifications of a FVII polypeptide can be made based on known functions of domains or regions of the polypeptide. For example, the Gla domain of FVII is known to be responsible for the binding of FVIIa to phospholipids, such as those displayed on activated platelets, albeit very weakly. Other vitamin K-dependent proteins, such as for example, FIX, FX, prothrombin, protein C and protein S, also possess Gla domains that effect binding of the protein to negatively-charged phospholipids, in many cases with a much greater affinity than the Gla domain of FVII. Introduction of a heterologous Gla domain into a FVII polypeptide is contemplated to increase the affinity of FVII for phospholipids. For example, FX (and FXa) display a relatively high affinity for phospholipids, compared with that of FVII (and FVIIa). Therefore, in one example, the Gla domain of FX, or a sufficient portion of the Gla domain of FX to effect phospholipid binding, can be introduced into a FVII polypeptide to generate a chimeric modified FVII polypeptide.

[0311] If necessary, a combination of rational and empirical methods can be used to design a FVII polypeptide. For example, the binding of Gla-domain containing polypeptides can be tested and screened for to identify which polypeptides exhibit the highest binding and/or affinity to phospholipids, such as for example, on platelet surfaces. Alternatively or additionally, a series of FVII polypeptides containing introduction of various heterologous Gla domains, or sufficient portions thereof, can be tested to determine which chimeric polypeptide exhibits the highest affinity and/or binding to phospholipids.

[0312] 2. Empirical (i.e. Screening)

[0313] Modified FVII polypeptides also can be generated empirically and then tested or screened to identify those having the particular activity or property contemplated. For example, modified FVII polypeptides can be generated by mutating any one or more amino acid residues of a FVII polypeptide using any method commonly known in the art (see also published U.S. Appln. No. 2004/0146938). Such modified FVII polypeptides can be tested in functional assays of coagulation to determine if they are “Hits” for increasing coagulant activity. The Hits can be further tested to determine if they display increased resistance to inhibitors such as TFPI or AT-III and/or display increased binding to phospholipids or improved pharmacokinetic properties, such as increased half-life, using any of the assays described herein or known to one of skill in the art.

[0314] Examples of methods to mutate FVII include methods that result in random mutagenesis across the entire sequence or methods that result in focused mutagenesis of a select region or domain of the FVII sequence. In one example, the number of mutations made to the polypeptide is 1, 2, 3, 4, 5, 6, 7, 8, 9, 10, 11, 12, 13, 14, 15, 16, 17, 18, 19, 20, 30, 40 or more.

[0315] a. Random Mutagenesis

[0316] Any of a variety of general approaches for directed protein evolution based on mutagenesis can be employed. Any of these, alone or in combination can be used to modify a polypeptide such as FVII to achieve a desired property. Such methods include random mutagenesis, where the amino acids in the starting protein sequence are replaced by all (or a group) of the 20 natural amino acids (as well as unnatural amino acids) either in single or multiple replacements at different amino acid positions on the same molecule, at the same time. Another method, restricted random mutagenesis, introduces either all or some of the 20 natural amino acids (as well as unnatural amino acids) or DNA-biased residues. The bias is based on the sequence of the DNA and not on that of the protein in a stochastic or semi-stochastic manner, respectively, within restricted or predefined regions of the protein known in advance to be involved in the biological activity being “evolved.” Exemplary methods for modifying a protease are described in U.S. application Ser. No. 10/677,977, herein incorporated by reference in its entirety. Additionally, any method known in the art can be used to modify or alter a protease polypeptide sequence, such as a FVII protease polypeptide.

[0317] Random mutagenesis methods include, for example, use of E. coli XL1red, UV irradiation, chemical modification such as by deamination, alkylation, or base analog mutagens, or PCR methods such as DNA shuffling, cassette mutagenesis, site-directed random mutagenesis, or error prone PCR (see e.g. U.S. Application No.: 2006-0115874). Such examples include, but are not limited to, chemical modification by hydroxylamine (Ruan, H., et al. (1997) Gene 188:35-39), the use of dNTP analogs (Zaccolo, M., et al. (1996) J. Mol. Biol. 255:589-603), or the use of commercially available random mutagenesis kits such as, for example, GeneMorph PCR-based random mutagenesis kits (Stratagene) or Diversify random mutagenesis kits (Clontech). The Diversify random mutagenesis kit allows the selection of a desired mutation rate for a given DNA sequence (from 2 to 8 mutations/1000 base pairs) by varying the amounts of manganese (Mn²⁺) or dGTP in the reaction mixture. Raising manganese levels initially increases the mutation rate, with a further mutation rate increase provided by increased concentration of dGTP. Even higher rates of mutation can be achieved by performing additional rounds of PCR.

[0318] b. Focused Mutagenesis

[0319] Focused mutation can be achieved by making one or more mutation in a pre-determined region of a gene sequence, for example, in regions of the protease domain that mediate catalytic activity, regions of the Gla domain that bind to phospholipids, regions of the FVII polypeptide that bind inhibitors or molecules such as TFPI, AT-III or Zn²⁺, such as those provided herein, or regions of the protein that interact with factors or receptors involved in clearance of FVIIa, such as those provided herein. In one example, any one or more amino acids of a polypeptide are mutated using any standard single or multiple site-directed mutagenesis kit such as for example QuikChange (Stratagene). In another example, any one or more amino acids of a protease are mutated by saturation mutagenesis (Zheng et al. (2004) Nucl. Acids. Res., 32:115). In one exemplary embodiment, a saturation mutagenesis technique is used in which the residue(s) of a region or domain are mutated to each of the 20 possible natural amino acids (as well as unnatural amino acids) (see for example the Kunkle method, Current Protocols in Molecular Biology, John Wiley and Sons, Inc., Media Pa.). In such a technique, a degenerate mutagenic oligonucleotide primer can be synthesized which contains randomization of nucleotides at the desired codon(s) encoding the selected amino acid(s). Exemplary randomization schemes include NNS- or NNK-randomization, where N represents any nucleotide, S represents guanine or cytosine and K represents guanine or thymine. The degenerate mutagenic primer is annealed to the single stranded DNA template and DNA polymerase is added to synthesize the complementary strand of the template. After ligation, the double stranded DNA template is transformed into E. Coli for amplification.

[0320] In an additional example, focused mutagenesis can be restricted to amino acids that are identified as hot spots in the initial rounds of screening. For example, following selection of modified FVII polypeptides from randomly mutagenized combinatorial libraries, a disproportionate number of mutations can be observed at specific positions or regions. These are designated “hot spots”, and can be observed through more than one round of mutagenesis and screening. Functional assays can then be performed on the modified FVII polypeptides to determine whether the muations at the hot spots correlate with the one or more desired property or activity. If correlation between the hot spots and the desired activity or property is verified, focused mutagenesis can be then used to specifically target these hot spots for further mutagenesis. This strategy allows for a more diverse and deep mutagenesis at particular specified positions, as opposed to the more shallow mutagenesis that occurs following random mutagenesis of a polypeptide sequence. For example, saturation mutagenesis can be used to mutate “hot spots” such as by using oligos containing NNt/g or NNt/c at these positions.

[0321] c. Screening

[0322] The modified polypeptides can be tested in screening assays individually, or can be tested as collections such as in libraries. In one example, the FVII variant polypeptides are randomly generated by mutagenesis, and cloned individually. Activity assessment is then individually performed on each individual protein mutant molecule, following protein expression and measurement of the appropriate activity. In some examples, the individual clones can be assayed in an addressable array, such that they are physically separated from each other so that the identity of each individual polypeptide is known based on its location in the array. For example, if each one is the single product of an independent mutagenesis reaction, the specific mutation can be easily determined without the need for sequencing. Alternatively, sequencing can be performed on the resulting modified polypeptides to determine those mutations that confer an activity.

[0323] In another example, the modified FVII polypeptides can be screened as collections or in a library. For example, a library of FVII polypeptides can be displayed on a genetic package for screening, including, but not limited to any replicable vector, such as a phage, virus, or bacterium, that can display a polypeptide moiety. The plurality of displayed polypeptides is displayed by a genetic package in such a way as to allow the polypeptide to bind and/or interact with a target polypeptide. Exemplary genetic packages include, but are not limited to, bacteriophages (see, e.g., Clackson et al. (1991) Making Antibody Fragments Using Phage Display Libraries, Nature, 352:624-628; Glaser et al. (1992) Antibody Engineering by Condon-Based Mutagenesis in a Filamentous Phage Vector System, J. Immunol., 149:3903 3913; Hoogenboom et al. (1991) Multi-Subunit Proteins on the Surface of Filamentous Phage: Methodologies for Displaying Antibody (Fate) Heavy and 30 Light Chains, Nucleic Acids Res., 19:4133-41370), baculoviruses (see, e.g., Boublik et al. (1995) Eukaryotic Virus Display: Engineering the Major Surface Glycoproteins of the Autographa California Nuclear Polyhedrosis Virus (ACNPV) for the Presentation of Foreign Proteins on the Virus Surface, Bio/Technology, 13:1079-1084), bacteria and other suitable vectors for displaying a protein, such as a phage-displayed protease. For example bacteriophages of interest include, but are not limited to, T4 phage, M13 phage and HI phage. Genetic packages are optionally amplified such as in a bacterial host.

[0324] Phage display is known to those of skill in the art and is described, for example, in Ladner et al., U.S. Pat. No. 5,223,409; Rodi et al. (2002) Curr. Opin. Chem. Biol. 6:92-96; Smith (1985) Science 228:1315-1317; WO 92/18619; WO 91/17271; WO 92/20791; WO 92/15679; WO 93/01288; WO 92/01047; WO 92/09690; WO 90/02809; de Haard et al. (1999) J. Biol. Chem. 274:18218-30; Hoogenboom et al. (1998) Immunotechnology 4:1-20; Hoogenboom et al. (2000) Immunol Today 2:371-8; Fuchs et al. (1991) Bio/Technology 9:1370-1372; Hay et al. (1992) Hum Antibod Hybridomas 3:81-85; Huse et al. (1989) Science 246:1275-1281; Griffiths et al. (1993) EMBO J. 12:725-734; Hawkins et al. (1992) J Mol Biol 226:889-896; Clackson et al. (1991) Nature 352:624-628; Gram et al. (1992) PNAS 89:3576-3580; Garrard et al. (1991) Bio/Technology 9:1373-1377; Rebar et al. (1996) Methods Enzymol. 267:129-49; Hoogenboom et al. (1991) Nuc Acid Res 19:4133-4137; and Barbas et al. (1991) PNAS 88:7978-7982. Nucleic acids suitable for phage display, e.g., phage vectors, are known in the art (see, e.g., Andris-Widhopf et al. (2000) J Immunol Methods, 28: 159-81, Armstrong et al. (1996) Academic Press, Kay et al., Ed. pp. 35-53; Corey et al. (1993) Gene 128(1):129-34; Cwirla et al. (1990) Proc Natl Acad Sci USA 87(16):6378-82; Fowlkes et al. (1992) Biotechniques 13(3):422-8; Hoogenboom et al. (1991) Nuc Acid Res 19(15):4133-7; McCafferty et al. (1990) Nature 348(6301):552-4; McConnell et al. (1994) Gene 151 (1-2):115-8; Scott and Smith (1990) Science 249(4967):386-90).

[0325] Libraries of variant FVII polypeptides for screening also can be expressed on the surfaces of cells, for example, prokaryotic or eukaryotic cells. Exemplary cells for cell surface expression include, but are not limited to, bacteria, yeast, insect cells, avian cells, plant cells, and mammalian cells (Chen and Georgiou (2002) Biotechnol Bioeng 79: 496-503). In one example, the bacterial cells for expression are Escherichia coli.

[0326] Variant polypeptides can be expressed as a fusion protein with a protein that is expressed on the surface of the cell, such as a membrane protein or cell surface-associated protein. For example, a variant protease can be expressed in E. coli as a fusion protein with an E. coli outer membrane protein (e.g. OmpA), a genetically engineered hybrid molecule of the major E. coli lipoprotein (Lpp) and the outer membrane protein OmpA or a cell surface-associated protein (e.g. pili and flagellar subunits). Generally, when bacterial outer membrane proteins are used for display of heterologous peptides or proteins, it is achieved through genetic insertion into permissive sites of the carrier proteins. Expression of a heterologous peptide or protein is dependent on the structural properties of the inserted protein domain, since the peptide or protein is more constrained when inserted into a permissive site as compared to fusion at the N- or C-terminus of a protein. Modifications to the fusion protein can be done to improve the expression of the fusion protein, such as the insertion of flexible peptide linker or spacer sequences or modification of the bacterial protein (e.g. by mutation, insertion, or deletion, in the amino acid sequence). Enzymes, such as β-lacatamase and the Cex exoglucanase of Cellulomonas fimi, have been successfully expressed as Lpp-OmpA fusion proteins on the surface of E. coli (Francisco J. A. and Georgiou G. Ann N Y Acad Sci. 745:372-382 (1994) and Georgiou G. et al. Protein Eng. 9:239-247 (1996)). Other peptides of 15-514 amino acids have been displayed in the second, third, and fourth outer loops on the surface of OmpA (Samuelson et al. J. Biotechnol. 96: 129-154 (2002)). Thus, outer membrane proteins can carry and display heterologous gene products on the outer surface of bacteria.

[0327] It is also possible to use other display formats to screen libraries of variant polypeptides. Exemplary other display formats include nucleic acid-protein fusions, ribozyme display (see e.g. Hanes and Pluckthun (1997) Proc. Natl. Acad. Sci. U.S.A. 13:4937-4942), bead display (Lam, K. S. et al. Nature (1991) 354, 82-84; K. S. et al. (1991) Nature, 354, 82-84; Houghten, R. A. et al. (1991) Nature, 354, 84-86; Furka, A. et al. (1991) Int. J. Peptide Protein Res. 37, 487-493; Lam, K. S., et al. (1997) Chem. Rev., 97, 411-448; U.S. Published Patent Application 2004-0235054) and protein arrays (see e.g. Cahill (2001) J. Immunol. Meth. 250:81-91, WO 01/40803, WO 99/51773, and US2002-0192673-A1)

[0328] In specific other cases, it can be advantageous to instead attach the variant polypeptides or phage libraries or cells expressing variant polypeptides to a solid support. For example, in some examples, cells expressing variant FVII polypeptides can be naturally adsorbed to a bead, such that a population of beads contains a single cell per bead (Freeman et al. Biotechnol. Bioeng. (2004) 86:196-200). Following immobilization to a glass support, microcolonies can be grown and screened with a chromogenic or fluorogenic substrate. In another example, variant FVII polypeptides or phage libraries or cells expressing variant proteases can be arrayed into titer plates and immobilized.

[0329] To identify those modified FVII polypeptides that exhibit increase coagulant activity, modified FVII polypeptides are screened individually or in a library and tested in functional assays to identify those that display increased resistance to inhibitors such as TFPI and AT-III, increased binding to activated platelets of phospholipids, increased half-life and/or display increased catalytic activity. Such assays are described herein or are known to those of skill in the art. For example, modified FVII polypeptides are tested for proteolytic activity. FVII polypeptides, alone or in the presence of TF, are incubated with varying concentrations of chromogenic substrate, such as the peptidyl substrate Spectrozyme FVIIa (CH₃SO₂-D-CHA-But-Arg-pNA.AcOH). Cleavage of the substrate is monitored by absorbance and the rate of substrate hydrolysis determined by linear regression using software readily available. In a further example, resistance of modified FVII polypeptides to TFPI or AT-III is assessed by incubation of the inhibitor with FVII polypeptides that have, in some instances, been preincubated with TF. The activity of FVII is then measured using any one or more of the activity or coagulation assays known in the art, and inhibition by TFPI or AT-III is assessed by comparing the activity of FVII polypeptides incubated with the inhibitor, with the activity of FVII polypeptides that were not incubated with the inhibitor.

[0330] The specific mutation of the candidate polypeptide can be determined using routine recombinant DNA techniques, such as sequencing In one embodiment, combinations of “Hits” can be made to further increase the properties and/or coagulant activities of the modified FVII polypeptide.

[0331] 3. Selecting FVII Variants

[0332] FVII polypeptide variants designed and identified by any one or more of the approaches described above, can be selected to identify those candidate FVII polypeptides that exhibit the desired properties or activities. The selection of variant FVII polypeptides is based on 1) first, testing the variant polypeptide for the specific activity or property being modified (i.e. resistance to TFPI, resistance to AT-III, Zn²⁺ binding, catalytic activity, half-life, binding and/or affinity for phospholipids; and 2) second, testing the variant polypeptide for retention of a FVII activity required for hemostasis and coagulation. Included among FVII activities that are required for coagulation include, for example, enzymatic, proteolytic or catalytic activity such as to effect factor X (FX) activation or factor IX (FIX) activation. Other FVII activities that can be assessed include, but are not limited to, antigenicity, the ability to bind tissue factor, factor X or factor IX, and the ability to bind to phospholipids. Thus, a modified FVII polypeptide, such as any provided herein or identified in the methods provided here, must retain some level, either increased or decreased, of a FVII activity required for coagulant activity. Standard assays known in the art or described herein below can be performed in vitro or in vivo in order to perform each of the above two assessments. For example, the proteolytic or catalytic activity of FVII can be assessed using various methods, including measuring the cleavage of a synthetic substrate, or measuring the activation of factor X (see, e.g. Examples 4, 5 and 11 below), and the resistance to TFPI or AT-III can be assessed by assaying for inhibition by TFPI or AT-III, respectively (see, e.g., Examples 7, 12 and 16). In addition, in vivo assays for procoagulant activity, such as is described, for example, in Examples 8 and 14 also can be employed.

[0333] The overall effect of any candidate FVII polypeptide variant is to exhibit a procoagulant activity. For example, a variant polypeptide can be increased in its resistance to TFPI, resistance to AT-III, half-life and/or binding and/or affinity for phospholipids, while also exhibiting an increase in catalytic activity. Such a FVII polypeptide would be selected as a candidate FVII variant for increasing coagulant activity.

[0334] In some cases, however, a FVII polypeptide modified to have improved coagulation activity due to any one or more of increased resistance to TFPI, increased resistance to AT-III, increased half-life or increased binding and/or affinity for phospholipids, may also exhibit a decrease in the catalytic activity or other activity required for coagulation as a result of the particular modification. These effects could result from, for example, conformational changes in the modified FVII polypeptides that interfere with binding to another molecule, conformational changes that result in an altered active site, or amino acid substitutions that directly involve one or more amino acid residues that are responsible for interaction with another molecule.

[0335] Thus, in another example, a variant polypeptide that is increased in its resistance to TFPI, resistance to AT-III, increased half-life and/or affinity for phospholipids may exhibit a concomitant decrease in its catalytic activity. The level of decrease in a FVII activity, such as a catalytic activity, that would be acceptable to ensure improved coagulant activity is dependent on the concomitant increase in the property that is being modified for improvement (i.e. increased resistance to TFPI), and can be empirically determined. Therefore, the results of such assessments set forth above can be balanced to identify those variant polypeptides that exhibit improved properties, while at the same time retaining at least a sufficient FVII activity, i.e. catalytic activity, to effect coagulation. Typically, the greater the increase in the property contemplated for modification (i.e. the greater the increase in resistance to TFPI), the greater the acceptable reduction in proteolytic or catalytic activity.

[0336] For example, a FVII polypeptide that exhibits a 100-fold increase in resistance to TFPI or AT-III can exhibit a decrease in proteolytic or catalytic activity that is decreased at or about 1.5-fold, 2, 3, 4, 5, 6, 7, 8, 9, 10, 20, 30, 40, 50, 60, 70, 80, 90-fold or more compared to the activity of an unmodified FVII polypeptide, and still be a viable candidate for increasing coagulant activity. Conversely, if resistance to TFPI or AT-III is increased by 10-fold, the level of decrease in catalytic activity to sustain an overall procoagulant activity would typically be a decrease of at or about 1.5-fold, 2, 3, 4, 5, 6, 7, 8, 9-fold or more as compared to the catalytic activity of an unmodified polypeptide. One of skill in the art can assess concomitant changes in TFPI resistance, AT-III resistance, activated platelet binding, half-life and proteolytic or catalytic activity, or any other activity or property, to determine whether the modified FVII polypeptide would be useful as a procoagulant therapeutic, such as, for example, to treat bleeding episodes in hemophilia patients.

### F. Production of FVII Polypeptides

[0337] FVII polypeptides, including modified FVII polypeptides, or domains thereof of FVII or other vitamin-K polypeptide, can be obtained by methods well known in the art for protein purification and recombinant protein expression. Any method known to those of skill in the art for identification of nucleic acids that encode desired genes can be used. Any method available in the art can be used to obtain a full length (i.e., encompassing the entire coding region) cDNA or genomic DNA clone encoding a FVII polypeptide or other vitamin-K polypeptide, such as from a cell or tissue source, such as for example from liver. Modified FVII polypeptides can be engineered as described herein, such as by site-directed mutagenesis.

[0338] FVII can be cloned or isolated using any available methods known in the art for cloning and isolating nucleic acid molecules. Such methods include PCR amplification of nucleic acids and screening of libraries, including nucleic acid hybridization screening, antibody-based screening and activity-based screening.

[0339] Methods for amplification of nucleic acids can be used to isolate nucleic acid molecules encoding a FVII polypeptide, including for example, polymerase chain reaction (PCR) methods. A nucleic acid containing material can be used as a starting material from which a FVII-encoding nucleic acid molecule can be isolated. For example, DNA and mRNA preparations, cell extracts, tissue extracts (e.g. from liver), fluid samples (e.g. blood, serum, saliva), samples from healthy and/or diseased subjects can be used in amplification methods. Nucleic acid libraries also can be used as a source of starting material. Primers can be designed to amplify a FVII-encoding molecule. For example, primers can be designed based on expressed sequences from which a FVII is generated. Primers can be designed based on back-translation of a FVII amino acid sequence. Nucleic acid molecules generated by amplification can be sequenced and confirmed to encode a FVII polypeptide.

[0340] Additional nucleotide sequences can be joined to a FVII-encoding nucleic acid molecule, including linker sequences containing restriction endonuclease sites for the purpose of cloning the synthetic gene into a vector, for example, a protein expression vector or a vector designed for the amplification of the core protein coding DNA sequences. Furthermore, additional nucleotide sequences specifying functional DNA elements can be operatively linked to a FVII-encoding nucleic acid molecule. Examples of such sequences include, but are not limited to, promoter sequences designed to facilitate intracellular protein expression, and secretion sequences designed to facilitate protein secretion. Additional nucleotide sequences such as sequences specifying protein binding regions also can be linked to FVII-encoding nucleic acid molecules. Such regions include, but are not limited to, sequences to facilitate uptake of FVII into specific target cells, or otherwise enhance the pharmacokinetics of the synthetic gene.

[0341] The identified and isolated nucleic acids can then be inserted into an appropriate cloning vector. A large number of vector-host systems known in the art can be used. Possible vectors include, but are not limited to, plasmids or modified viruses, but the vector system must be compatible with the host cell used. Such vectors include, but are not limited to, bacteriophages such as lambda derivatives, or plasmids such as pBR322 or pUC plasmid derivatives or the Bluescript vector (Stratagene, La Jolla, Calif.). The insertion into a cloning vector can, for example, be accomplished by ligating the DNA fragment into a cloning vector which has complementary cohesive termini. Insertion can be effected using TOPO cloning vectors (Invirtogen, Carlsbad, Calif.). If the complementary restriction sites used to fragment the DNA are not present in the cloning vector, the ends of the DNA molecules can be enzymatically modified. Alternatively, any site desired can be produced by ligating nucleotide sequences (linkers) onto the DNA termini; these ligated linkers can contain specific chemically synthesized oligonucleotides encoding restriction endonuclease recognition sequences. In an alternative method, the cleaved vector and FVII protein gene can be modified by homopolymeric tailing. Recombinant molecules can be introduced into host cells via, for example, transformation, transfection, infection, electroporation and sonoporation, so that many copies of the gene sequence are generated.

[0342] In specific embodiments, transformation of host cells with recombinant DNA molecules that incorporate the isolated FVII protein gene, cDNA, or synthesized DNA sequence enables generation of multiple copies of the gene. Thus, the gene can be obtained in large quantities by growing transformants, isolating the recombinant DNA molecules from the transformants and, when necessary, retrieving the inserted gene from the isolated recombinant DNA.

[0343] 1. Vectors and Cells

[0344] For recombinant expression of one or more of the FVII proteins, the nucleic acid containing all or a portion of the nucleotide sequence encoding the FVII protein can be inserted into an appropriate expression vector, i.e., a vector that contains the necessary elements for the transcription and translation of the inserted protein coding sequence. Exemplary of such a vector is any mammalian expression vector such as, for example, pCMV. The necessary transcriptional and translational signals also can be supplied by the native promoter for a FVII genes, and/or their flanking regions.

[0345] Also provided are vectors that contain nucleic acid encoding the FVII or modified FVII. Cells containing the vectors also are provided. The cells include eukaryotic and prokaryotic cells, and the vectors are any suitable for use therein.

[0346] Prokaryotic and eukaryotic cells, including endothelial cells, containing the vectors are provided. Such cells include bacterial cells, yeast cells, fungal cells, Archea, plant cells, insect cells and animal cells. The cells are used to produce a FVII polypeptide or modified FVII polypeptide thereof by growing the above-described cells under conditions whereby the encoded FVII protein is expressed by the cell, and recovering the expressed FVII protein. For purposes herein, the FVII can be secreted into the medium.

[0347] In one embodiment, vectors containing a sequence of nucleotides that encodes a polypeptide that has FVII activity and contains all or a portion of the FVII polypeptide, or multiple copies thereof, are provided. The vectors can be selected for expression of the FVII polypeptide or modified FVII polypeptide thereof in the cell or such that the FVII protein is expressed as a secreted protein. When the FVII is expressed the nucleic acid is linked to nucleic acid encoding a secretion signal, such as the Saccharomyces cerevisiae α-mating factor signal sequence or a portion thereof, or the native signal sequence.

[0348] A variety of host-vector systems can be used to express the protein coding sequence. These include but are not limited to mammalian cell systems infected with virus (e.g. vaccinia virus, adenovirus and other viruses); insect cell systems infected with virus (e.g. baculovirus); microorganisms such as yeast containing yeast vectors; or bacteria transformed with bacteriophage, DNA, plasmid DNA, or cosmid DNA. The expression elements of vectors vary in their strengths and specificities. Depending on the host-vector system used, any one of a number of suitable transcription and translation elements can be used.

[0349] Any methods known to those of skill in the art for the insertion of DNA fragments into a vector can be used to construct expression vectors containing a chimeric gene containing appropriate transcriptional/translational control signals and protein coding sequences. These methods can include in vitro recombinant DNA and synthetic techniques and in vivo recombinants (genetic recombination). Expression of nucleic acid sequences encoding a FVII polypeptide or modified FVII polypeptide, or domains, derivatives, fragments or homologs thereof, can be regulated by a second nucleic acid sequence so that the genes or fragments thereof are expressed in a host transformed with the recombinant DNA molecule(s). For example, expression of the proteins can be controlled by any promoter/enhancer known in the art. In a specific embodiment, the promoter is not native to the genes for a FVII protein. Promoters which can be used include but are not limited to the SV40 early promoter (Bemoist and Chambon, Nature 290:304-310 (1981)), the promoter contained in the 3′ long terminal repeat of Rous sarcoma virus (Yamamoto et al. Cell 22:787-797 (1980)), the herpes thymidine kinase promoter (Wagner et al, Proc. Natl. Acad. Sci. USA 78:1441-1445 (1981)), the regulatory sequences of the metallothionein gene (Brinster et al, Nature 296:39-42 (1982)); prokaryotic expression vectors such as the β-lactamase promoter (Jay et al., (1981) Proc. Natl. Acad. Sci. USA 78:5543) or the tac promoter (DeBoer et al., Proc. Natl. Acad. Sci. USA 80:21-25 (1983)); see also “Useful Proteins from Recombinant Bacteria”: in Scientific American 242:79-94 (1980)); plant expression vectors containing the nopaline synthetase promoter (Herrar-Estrella et al., Nature 303:209-213 (1984)) or the cauliflower mosaic virus 35S RNA promoter (Garder et al., Nucleic Acids Res. 9:2871 (1981)), and the promoter of the photosynthetic enzyme ribulose bisphosphate carboxylase (Herrera-Estrella et al., Nature 310:115-120 (1984)); promoter elements from yeast and other fungi such as the Gal4 promoter, the alcohol dehydrogenase promoter, the phosphoglycerol kinase promoter, the alkaline phosphatase promoter, and the following animal transcriptional control regions that exhibit tissue specificity and have been used in transgenic animals: elastase I gene control region which is active in pancreatic acinar cells (Swift et al., Cell 38:639-646 (1984); Ornitz et al., Cold Spring Harbor Symp. Quant. Biol. 50:399-409 (1986); MacDonald, Hepatology 7:425-515 (1987)); insulin gene control region which is active in pancreatic beta cells (Hanahan et al., Nature 315:115-122 (1985)), immunoglobulin gene control region which is active in lymphoid cells (Grosschedl et al., Cell 38:647-658 (1984); Adams et al., Nature 318:533-538 (1985); Alexander et al., Mol. Cell. Biol. 7:1436-1444 (1987)), mouse mammary tumor virus control region which is active in testicular, breast, lymphoid and mast cells (Leder et al., Cell 45:485-495 (1986)), albumin gene control region which is active in liver (Pinckert et al., Genes and Devel. 1:268-276 (1987)), alpha-fetoprotein gene control region which is active in liver (Krumlauf et al., Mol. Cell. Biol. 5:1639-1648 (1985); Hammer et al., Science 235:53-58 1987)), alpha-1 antitrypsin gene control region which is active in liver (Kelsey et al., Genes and Devel. 1:161-171 (1987)), beta globin gene control region which is active in myeloid cells (Mogram et al., Nature 315:338-340 (1985); Kollias et al., Cell 46:89-94 (1986)), myelin basic protein gene control region which is active in oligodendrocyte cells of the brain (Readhead et al., Cell 48:703-712 (1987)), myosin light chain-2 gene control region which is active in skeletal muscle (Sani, Nature 314:283-286 (1985)), and gonadotrophic releasing hormone gene control region which is active in gonadotrophs of the hypothalamus (Mason et al., Science 234:1372-1378 (1986)).

[0350] In a specific embodiment, a vector is used that contains a promoter operably linked to nucleic acids encoding a FVII polypeptide or modified FVII polypeptide, or a domain, fragment, derivative or homolog, thereof, one or more origins of replication, and optionally, one or more selectable markers (e.g., an antibiotic resistance gene). Vectors and systems for expression of FVII polypeptides include the well known Pichia vectors (available, for example, from Invitrogen, San Diego, Calif.), particularly those designed for secretion of the encoded proteins. Exemplary plasmid vectors for expression in mammalian cells include, for example, pCMV. Exemplary plasmid vectors for transformation of E. coli cells, include, for example, the pQE expression vectors (available from Qiagen, Valencia, Calif.; see also literature published by Qiagen describing the system). pQE vectors have a phage T5 promoter (recognized by E. coli RNA polymerase) and a double lac operator repression module to provide tightly regulated, high-level expression of recombinant proteins in E. coli, a synthetic ribosomal binding site (RBS II) for efficient translation, a 6×His tag coding sequence, t₀ and T1 transcriptional terminators, ColE1 origin of replication, and a beta-lactamase gene for conferring ampicillin resistance. The pQE vectors enable placement of a 6×His tag at either the N- or C-terminus of the recombinant protein. Such plasmids include pQE 32, pQE 30, and pQE 31 which provide multiple cloning sites for all three reading frames and provide for the expression of N-terminally 6×His-tagged proteins. Other exemplary plasmid vectors for transformation of E. coli cells, include, for example, the pET expression vectors (see, U.S. Pat. No. 4,952,496; available from NOVAGEN, Madison, Wis.; see, also literature published by Novagen describing the system). Such plasmids include pET 11a, which contains the T71ac promoter, T7 terminator, the inducible E. coli lac operator, and the lac repressor gene; pET 12a-c, which contains the T7 promoter, T7 terminator, and the E. coli ompT secretion signal; and pET 15b and pET19b (NOVAGEN, Madison, Wis.), which contain a His-Tag™ leader sequence for use in purification with a His column and a thrombin cleavage site that permits cleavage following purification over the column, the T7-lac promoter region and the T7 terminator.

[0351] 2. Expression Systems

[0352] FVII polypeptides (modified and unmodified) can be produced by any methods known in the art for protein production including in vitro and in vivo methods such as, for example, the introduction of nucleic acid molecules encoding FVII into a host cell, host animal and expression from nucleic acid molecules encoding FVII in vitro. FVII and modified FVII polypeptides can be expressed in any organism suitable to produce the required amounts and forms of a FVII polypeptide needed for administration and treatment. Expression hosts include prokaryotic and eukaryotic organisms such as E. coli, yeast, plants, insect cells, mammalian cells, including human cell lines and transgenic animals. Expression hosts can differ in their protein production levels as well as the types of post-translational modifications that are present on the expressed proteins. The choice of expression host can be made based on these and other factors, such as regulatory and safety considerations, production costs and the need and methods for purification.

[0353] Expression in eukaryotic hosts can include expression in yeasts such as Saccharomyces cerevisiae and Pichia pastoria, insect cells such as Drosophila cells and lepidopteran cells, plants and plant cells such as tobacco, corn, rice, algae, and lemna. Eukaryotic cells for expression also include mammalian cells lines such as Chinese hamster ovary (CHO) cells or baby hamster kidney (BHK) cells. Eukaryotic expression hosts also include production in transgenic animals, for example, including production in serum, milk and eggs. Transgenic animals for the production of wild-type FVII polypeptides are known in the art (U.S. Patent Publication Nos. 20020166130 and 20040133930) and can be adapted for production of modified FVII polypeptides provided herein.

[0354] Many expression vectors are available and known to those of skill in the art for the expression of FVII. The choice of expression vector is influenced by the choice of host expression system. Such selection is well within the level of skill of the skilled artisan. In general, expression vectors can include transcriptional promoters and optionally enhancers, translational signals, and transcriptional and translational termination signals. Expression vectors that are used for stable transformation typically have a selectable marker which allows selection and maintenance of the transformed cells. In some cases, an origin of replication can be used to amplify the copy number of the vectors in the cells.

[0355] FVII or modified FVII polypeptides also can be utilized or expressed as protein fusions. For example, a fusion can be generated to add additional functionality to a polypeptide. Examples of fusion proteins include, but are not limited to, fusions of a signal sequence, a tag such as for localization, e.g. a his₆ tag or a myc tag, or a tag for purification, for example, a GST fusion, and a sequence for directing protein secretion and/or membrane association.

[0356] In one embodiment, the FVII polypeptide or modified FVII polypeptides can be expressed in an active form, whereby activation is achieved by autoactivation of the polypeptide following secretion. In another embodiment, the protease is expressed in an inactive, zymogen form.

[0357] Methods of production of FVII polypeptides can include coexpression of one or more additional heterologous polypeptides that can aid in the generation of the FVII polypeptides. For example, such polypeptides can contribute to the post-translation processing of the FVII polypeptides. Exemplary polypeptides include, but are not limited to, peptidases that help cleave FVII precursor sequences, such as the propeptide sequence, and enzymes that participate in the modification of the FVII polypeptide, such as by glycosylation, hydroxylation, carboxylation, or phosphorylation, for example. An exemplary peptidase that can be coexpressed with FVII is PACE/furin (or PACE-SOL), which aids in the cleavage of the FVII propeptide sequence. An exemplary protein that aids in the carboxylation of the FVII polypeptide is the warfarin-sensitive enzyme vitamin K 2,3-epoxide reductase (VKOR), which produces reduced vitamin K for utilization as a cofactor by the vitamin K-dependent y-carboxylase (Wajih et al., J. Biol. Chem. 280(36)31603-31607). A subunit of this enzyme, VKORC1, can be coexpressed with the modified FVII polypeptide to increase the γ-carboxylation The one or more additional polypeptides can be expressed from the same expression vector as the FVII polypeptide or from a different vector.

[0358] a. Prokaryotic Expression

[0359] Prokaryotes, especially E. coli, provide a system for producing large amounts of FVII (see, for example, Platis et al. (2003) Protein Exp. Purif. 31(2): 222-30; and Khalizzadeh et al. (2004) J. Ind. Microbiol. Biotechnol. 31(2): 63-69). Transformation of E. coli is a simple and rapid technique well known to those of skill in the art. Expression vectors for E. coli can contain inducible promoters that are useful for inducing high levels of protein expression and for expressing proteins that exhibit some toxicity to the host cells. Examples of inducible promoters include the lac promoter, the trp promoter, the hybrid tac promoter, the T7 and SP6 RNA promoters and the temperature regulated λP_{L} promoter.

[0360] FVII can be expressed in the cytoplasmic environment of E. coli. The cytoplasm is a reducing environment and for some molecules, this can result in the formation of insoluble inclusion bodies. Reducing agents such as dithiothreitol and β-mercaptoethanol and denaturants (e.g., such as guanidine-HCl and urea) can be used to resolubilize the proteins. An alternative approach is the expression of FVII in the periplasmic space of bacteria which provides an oxidizing environment and chaperonin-like and disulfide isomerases leading to the production of soluble protein. Typically, a leader sequence is fused to the protein to be expressed which directs the protein to the periplasm. The leader is then removed by signal peptidases inside the periplasm. Examples of periplasmic-targeting leader sequences include the pelB leader from the pectate lyase gene and the leader derived from the alkaline phosphatase gene. In some cases, periplasmic expression allows leakage of the expressed protein into the culture medium. The secretion of proteins allows quick and simple purification from the culture supernatant. Proteins that are not secreted can be obtained from the periplasm by osmotic lysis. Similar to cytoplasmic expression, in some cases proteins can become insoluble and denaturants and reducing agents can be used to facilitate solubilization and refolding. Temperature of induction and growth also can influence expression levels and solubility. Typically, temperatures between 25° C. and 37° C. are used. Mutations also can be used to increase solubility of expressed proteins. Typically, bacteria produce aglycosylated proteins. Thus, if proteins require glycosylation for function, glycosylation can be added in vitro after purification from host cells.

[0361] b. Yeast

[0362] Yeasts such as Saccharomyces cerevisiae, Schizosaccharomyces pombe, Yarrowia lipolytica, Kluyveromyces lactis, and Pichia pastoris are useful expression hosts for FVII (see for example, Skoko et al. (2003) Biotechnol. Appl. Biochem. 38(Pt3):257-65). Yeast can be transformed with episomal replicating vectors or by stable chromosomal integration by homologous recombination. Typically, inducible promoters are used to regulate gene expression. Examples of such promoters include GAL1, GAL7, and GAL5 and metallothionein promoters such as CUP1. Expression vectors often include a selectable marker such as LEU2, TRP1, HIS3, and URA3 for selection and maintenance of the transformed DNA. Proteins expressed in yeast are often soluble and co-expression with chaperonins, such as Bip and protein disulfide isomerase, can improve expression levels and solubility. Additionally, proteins expressed in yeast can be directed for secretion using secretion signal peptide fusions such as the yeast mating type alpha-factor secretion signal from Saccharomyces cerevisiae and fusions with yeast cell surface proteins such as the Aga2p mating adhesion receptor or the Arxula adeninivorans glucoamylase. A protease cleavage site (e.g., the Kex-2 protease) can be engineered to remove the fused sequences from the polypeptides as they exit the secretion pathway. Yeast also is capable of glycosylation at Asn-X-Ser/Thr motifs.

[0363] c. Insects and Insect Cells

[0364] Insects and insect cells, particularly using a baculovirus expression system, are useful for expressing polypeptides such as FVII or modified forms thereof (see, for example, Muneta et al. (2003) J. Vet. Med. Sci. 65(2):219-23). Insect cells and insect larvae, including expression in the haemolymph, express high levels of protein and are capable of most of the post-translational modifications used by higher eukaryotes. Baculoviruses have a restrictive host range which improves the safety and reduces regulatory concerns of eukaryotic expression. Typically, expression vectors use a promoter such as the polyhedrin promoter of baculovirus for high level expression. Commonly used baculovirus systems include baculoviruses such as Autographa californica nuclear polyhedrosis virus (AcNPV), and the Bombyx mori nuclear polyhedrosis virus (BmNPV) and an insect cell line such as Sf9 derived from Spodoptera frugiperda, Pseudaletia unipuncta (A7S) and Danaus plexippus (DpN1). For high level expression, the nucleotide sequence of the molecule to be expressed is fused immediately downstream of the polyhedrin initiation codon of the virus. Mammalian secretion signals are accurately processed in insect cells and can be used to secrete the expressed protein into the culture medium. In addition, the cell lines Pseudaletia unipuncta (A7S) and Danaus plexippus (DpN1) produce proteins with glycosylation patterns similar to mammalian cell systems.

[0365] An alternative expression system in insect cells is the use of stably transformed cells. Cell lines such as the Schnieder 2 (S2) and Kc cells (Drosophila melanogaster) and C7 cells (Aedes albopictus) can be used for expression. The Drosophila metallothionein promoter can be used to induce high levels of expression in the presence of heavy metal induction with cadmium or copper. Expression vectors are typically maintained by the use of selectable markers such as neomycin and hygromycin.

[0366] d. Mammalian Cells

[0367] Mammalian expression systems can be used to express FVII polypeptides. Expression constructs can be transferred to mammalian cells by viral infection such as adenovirus or by direct DNA transfer such as liposomes, calcium phosphate, DEAE-dextran and by physical means such as electroporation and microinjection. Expression vectors for mammalian cells typically include an mRNA cap site, a TATA box, a translational initiation sequence (Kozak consensus sequence) and polyadenylation elements. Such vectors often include transcriptional promoter-enhancers for high level expression, for example the SV40 promoter-enhancer, the human cytomegalovirus (CMV) promoter, and the long terminal repeat of Rous sarcoma virus (RSV). These promoter-enhancers are active in many cell types. Tissue and cell-type promoters and enhancer regions also can be used for expression. Exemplary promoter/enhancer regions include, but are not limited to, those from genes such as elastase I, insulin, immunoglobulin, mouse mammary tumor virus, albumin, alpha-fetoprotein, alpha 1-antitrypsin, beta-globin, myelin basic protein, myosin light chain-2, and gonadotropic releasing hormone gene control. Selectable markers can be used to select for and maintain cells with the expression construct. Examples of selectable marker genes include, but are not limited to, hygromycin B phosphotransferase, adenosine deaminase, xanthine-guanine phosphoribosyl transferase, aminoglycoside phosphotransferase, dihydrofolate reductase and thymidine kinase. Fusion with cell surface signaling molecules such as TCR-ζ and Fc_{ε}RI-γ can direct expression of the proteins in an active state on the cell surface.

[0368] Many cell lines are available for mammalian expression including mouse, rat human, monkey, and chicken and hamster cells. Exemplary cell lines include, but are not limited to, BHK (i.e. BHK-21 cells), 293-F, CHO, Balb/3T3, HeLa, MT2, mouse NS0 (non-secreting) and other myeloma cell lines, hybridoma and heterohybridoma cell lines, lymphocytes, fibroblasts, Sp2/0, COS, NIH3T3, HEK293, 293S, 293T, 2B8, and HKB cells. Cell lines also are available adapted to serum-free media which facilitates purification of secreted proteins from the cell culture media. One such example is the serum free EBNA-1 cell line (Pham et al., (2003) Biotechnol. Bioeng. 84:332-42). Expression of recombinant FVII polypeptides exhibiting similar structure and post-translational modifications as plasma-derived FVII are known in the art (see, e.g., Jurlander et al. (2003) Semin Throm Hemost). Methods of optimizing vitamin K-dependent protein expression are known. For example, supplementation of vitamin K in culture medium or co-expression of vitamin K-dependent γ-carboxylases (Wajih et al., J. Biol. Chem. 280(36)31603-31607) can aid in post-translational modification of vitamin K-dependent proteins, such as FVII polypeptides.

[0369] e. Plants

[0370] Transgenic plant cells and plants can be used for the expression of FVII. Expression constructs are typically transferred to plants using direct DNA transfer such as microprojectile bombardment and PEG-mediated transfer into protoplasts, and with agrobacterium-mediated transformation. Expression vectors can include promoter and enhancer sequences, transcriptional termination elements, and translational control elements. Expression vectors and transformation techniques are usually divided between dicot hosts, such as Arabidopsis and tobacco, and monocot hosts, such as corn and rice. Examples of plant promoters used for expression include the cauliflower mosaic virus promoter, the nopaline synthase promoter, the ribose bisphosphate carboxylase promoter and the ubiquitin and UBQ3 promoters. Selectable markers such as hygromycin, phosphomannose isomerase and neomycin phosphotransferase are often used to facilitate selection and maintenance of transformed cells. Transformed plant cells can be maintained in culture as cells, aggregates (callus tissue) or regenerated into whole plants. Because plants have different glycosylation patterns than mammalian cells, this can influence the choice to produce FVII in these hosts. Transgenic plant cells also can include algae engineered to produce proteins (see, for example, Mayfield et al. (2003) PNAS 100:438-442). Because plants have different glycosylation patterns than mammalian cells, this can influence the choice to produce FVII in these hosts.

[0371] 2. Purification

[0372] Methods for purification of FVII polypeptides from host cells depend on the chosen host cells and expression systems. For secreted molecules, proteins are generally purified from the culture media after removing the cells. For intracellular expression, cells can be lysed and the proteins purified from the extract. When transgenic organisms such as transgenic plants and animals are used for expression, tissues or organs can be used as starting material to make a lysed cell extract. Additionally, transgenic animal production can include the production of polypeptides in milk or eggs, which can be collected, and if necessary further the proteins can be extracted and further purified using standard methods in the art.

[0373] FVII can be purified using standard protein purification techniques known in the art including but not limited to, SDS-PAGE, size fraction and size exclusion chromatography, ammonium sulfate precipitation, chelate chromatography and ionic exchange chromatography. For example, FVII polypeptides can be purified by anion exchange chromatography. Exemplary of a method to purify FVII polypeptides is by using an ion exchange column that permits binding of any polypeptide that has a functional Gla domain, followed by elution in the presence of calcium (See e.g., Example 3). Affinity purification techniques also can be used to improve the efficiency and purity of the preparations. For example, antibodies, receptors and other molecules that bind FVII can be used in affinity purification. In another example, purification also can be enhanced using a soluble TF (sTF) affinity column (Maun et al. (2005) Prot Sci 14:1171-1180). Expression constructs also can be engineered to add an affinity tag such as a myc epitope, GST fusion or His₆ and affinity purified with myc antibody, glutathione resin, and Ni-resin, respectively, to a protein. Purity can be assessed by any method known in the art including gel electrophoresis and staining and spectrophotometric techniques.

[0374] The FVII protease can be expressed and purified to be in an inactive form (zymogen form) or alternatively the expressed protease can be purified into an active form, such as by autocatalysis. For example, FVII polypeptides that have been activated via proteolytic cleavage of the Arg¹⁵²-Ile¹⁵³ can be prepared in vitro (i.e. FVIIa; two-chain form). The FVII polypeptides can be first prepared by any of the methods of production described herein, including, but not limited to, production in mammalian cells followed by purification. Cleavage of the FVII polypeptides into the active protease form, FVIIa, can be accomplished by several means. For example, autoactivation during incubation with phospholipid vesicles in the presence of calcium can be achieved in 45 minutes (Nelsestuen et al. (2001) J Biol Chem 276:39825-31). FVII polypeptides also can be activated to completion by incubation with factor Xa, factor XIIa or TF in the presence calcium, with or without phospholipids (see e.g., Example 3 and Broze et al. (1980) J Biol Chem 255:1242-1247, Higashi et al. (1996) J Biol Chem 271:26569-26574, Harvey et al. J Biol Chem 278:8363-8369).

[0375] 3. Fusion Proteins

[0376] Fusion proteins containing a modified FVII polypeptide and one or more other polypeptides also are provided. Pharmaceutical compositions containing such fusion proteins formulated for administration by a suitable route are provided. Fusion proteins are formed by linking in any order the modified FVII polypeptide and an agent, such as an antibody or fragment thereof, growth factor, receptor, ligand, and other such agent for the purposes of facilitating the purification of a FVII polypeptide, altering the pharmacodynamic properties of a FVII polypeptide by directing, for example, by directing the polypeptide to a targeted cell or tissue, and/or increasing the expression or secretion of the FVII polypeptide. Typically any FVII fusion protein retains at least about 30%, 40%, 50%, 60%, 70%, 80%, 90%, or 95% coagulant activity compared with a non-fusion FVII polypeptide, including 96%, 97%, 98%, 99% or greater coagulant activity compared with a non-fusion polypeptide.

[0377] Linkage of a FVII polypeptide with another polypeptide can be effected directly or indirectly via a linker. In one example, linkage can be by chemical linkage, such as via heterobifunctional agents or thiol linkages or other such linkages. Fusion also can be effected by recombinant means. Fusion of a FVII polypeptide to another polypeptide can be to the N- or C-terminus of the FVII polypeptide. Non-limiting examples of polypeptides that can be used in fusion proteins with a FVII polypeptide provided herein include, for example, a GST (glutathione S-transferase) polypeptide, Fc domain from immunoglobulin G, or a heterologous signal sequence. The fusion proteins can contain additional components, such as E. coli maltose binding protein (MBP) that aid in uptake of the protein by cells (see, International PCT application No. WO 01/32711).

[0378] A fusion protein can be produced by standard recombinant techniques. For example, DNA fragments coding for the different polypeptide sequences can be ligated together in-frame in accordance with conventional techniques, e.g., by employing blunt-ended or stagger-ended termini for ligation, restriction enzyme digestion to provide for appropriate termini, filling-in of cohesive ends as appropriate, alkaline phosphatase treatment to avoid undesirable joining, and enzymatic ligation. In another embodiment, the fusion gene can be synthesized by conventional techniques including automated DNA synthesizers. Alternatively, PCR amplification of gene fragments can be carried out using anchor primers that give rise to complementary overhangs between two consecutive gene fragments that can subsequently be annealed and reamplified to generate a chimeric gene sequence (see, e.g., Ausubel et al. (eds.) CURRENT PROTOCOLS IN MOLECULAR BIOLOGY, John Wiley & Sons, 1992). Moreover, many expression vectors are commercially available that already encode a fusion moiety (e.g., a GST polypeptide). A FVII-encoding nucleic acid can be cloned into such an expression vector such that the fusion moiety is linked in-frame to the protease protein.

[0379] 4. Polypeptide Modification

[0380] Modified FVII polypeptides can be prepared as naked polypeptide chains or as a complex. For some applications, it can be desirable to prepare modified FVII in a “naked” form without post-translational or other chemical modifications. Naked polypeptide chains can be prepared in suitable hosts that do not post-translationally modify FVII. Such polypeptides also can be prepared in in vitro systems and using chemical polypeptide synthesis. For other applications, particular modifications can be desired including pegylation, albumination, glycosylation, carboxylation, hydroxylation, phosphorylation, or other known modifications. Modifications can be made in vitro or, for example, by producing the modified FVII in a suitable host that produces such modifications.

[0381] 5. Nucleotide Sequences

[0382] Nucleic acid molecules encoding FVII or modified FVII polypeptides are provided herein. Nucleic acid molecules include allelic variants or splice variants of any encoded FVII polypeptide. Exemplary of nucleic acid molecules provided herein are any that encode a modified FVII polypeptide provided herein, such as any encoding a polypeptide set forth in any of SEQ ID NOS: 18-43, 125-150 or 206-250. In one embodiment, nucleic acid molecules provided herein have at least 50, 60, 65, 70, 75, 80, 85, 90, 91, 92, 93, 94, 95, or 99% sequence identity or hybridize under conditions of medium or high stringency along at least 70% of the full-length of any nucleic acid encoding a FVII polypeptide provided herein. In another embodiment, a nucleic acid molecule can include those with degenerate codon sequences encoding any of the FVII polypeptides provided herein.

### G. Assessing Modified FVII Polypeptide Activities

[0383] The activities and properties of FVII polypeptides can be assessed in vitro and/or in vivo. Assays for such assessment are known to those of skill in the art and are known to correlate tested activities and results to therapeutic and in vivo activities. In one example, FVII variants can be assessed in comparison to unmodified and/or wild-type FVII. In another example, the activity of modified FVII polypeptides can be assessed following exposure in vitro or in vivo to TFPI or AT-III and compared with that of modified FVII polypeptides that have not been exposed to TFPI or AT-III. In vitro assays include any laboratory assay known to one of skill in the art, such as for example, cell-based assays including coagulation assays, binding assays, protein assays, and molecular biology assays. In vivo assays include FVII assays in animal models as well as administration to humans. In some cases, activity of FVII in vivo can be determined by assessing blood, serum, or other bodily fluid for assay determinants. FVII variants also can be tested in vivo to assess an activity or property, such as therapeutic effect.

[0384] Typically, assays described herein are with respect to the two-chain activated form of FVII, i.e. FVIIa. Such assays also can be performed with the single chain form, such as to provide a negative control since such form typically does not contain proteolytic or catalytic activity required for the coagulant activity of FVII. In addition, such assays also can be performed in the presence of cofactors, such as TF, which in some instances augments the activity of FVII.

[0385] 1. In Vitro Assays

[0386] Exemplary in vitro assays include assays to assess polypeptide modification and activity. Modifications can be assessed using in vitro assays that assess γ-carboxylation and other post-translational modifications, protein assays and conformational assays known in the art. Assays for activity include, but are not limited to, measurement of FVII interaction with other coagulation factors, such as TF, factor X and factor IX, proteolytic assays to determine the proteolytic activity of FVII polypeptides, assays to determine the binding and/or affinity of FVII polypeptides for phosphatidylserines and other phospholipids, and cell based assays to determine the effect of FVII polypeptides on coagulation.

[0387] Concentrations of modified FVII polypeptides can be assessed by methods well-known in the art, including but not limited to, enzyme-linked immunosorbant assays (ELISA), SDS-PAGE; Bradford, Lowry, BCA methods; UV absorbance, and other quantifiable protein labeling methods, such as, but not limited to, immunological, radioactive and fluorescent methods and related methods.

[0388] Assessment of cleavage products of proteolysis reactions, including cleavage of FVII polypeptides or products produced by FVII protease activity, can be performed using methods including, but not limited to, chromogenic substrate cleavage, HPLC, SDS-PAGE analysis, ELISA, Western blotting, immunohistochemistry, immunoprecipitation, NH2-terminal sequencing, and protein labeling.

[0389] Structural properties of modified FVII polypeptides can also be assessed. For example, X-ray crystallography, nuclear magnetic resonance (NMR), and cryoelectron microscopy (cryo-EM) of modified FVII polypeptides can be performed to assess three-dimensional structure of the FVII polypeptides and/or other properties of FVII polypeptides, such as Ca²⁺ or cofactor binding.

[0390] Additionally, the presence and extent of FVII degradation can be measured by standard techniques such as sodium dodecyl sulfate polyacrylamide gel electrophoresis (SDS-PAGE), and Western blotting of electrophoresed FVII-containing samples. FVII polypeptides that have been exposed to proteases can also be subjected to N-terminal sequencing to determine location or changes in cleavage sites of the modified FVII polypeptides.

[0391] a. Post-Translational Modification

[0392] FVII polypeptides also can be assessed for the presence of post-translational modifications. Such assays are known in the art and include assays to measure glycosylation, hydroxylation, and carboxylation. In an exemplary assay for glycosylation, carbohydrate analysis can be performed, for example, with SDS page analysis of FVII polypeptides exposed to hydrazinolysis or endoglycosidase treatment. Hydrazinolysis releases N- and O-linked glycans from glycoproteins by incubation with anhydrous hydrazine, while endoglycosidase release involves PNGase F, which releases most N-glycans from glycoproteins. Hydrazinolysis or endoglycosidase treatment of FVII polypeptides generates a reducing terminus that can be tagged with a fluorophore or chromophore label. Labeled FVII polypeptides can be analyzed by fluorophore-assisted carbohydrate electrophoresis (FACE). The fluorescent tag for glycans also can be used for monosaccharide analysis, profiling or fingerprinting of complex glycosylation patterns by HPLC. Exemplary HPLC methods include hydrophilic interaction chromatography, electronic interaction, ion-exchange, hydrophobic interaction, and size-exclusion chromatography. Exemplary glycan probes include, but are not limited to, 3-(acetylamino)-6-aminoacridine (AA-Ac) and 2-aminobenzoic acid (2-AA). Carbohydrate moieties can also be detected through use of specific antibodies that recognize the glycosylated FVII polypeptide. An exemplary assay to measure β-hydroxylation comprises reverse phase HPLC analysis of FVII polypeptides that have been subjected to alkaline hydrolysis (Przysiecki et al. (1987) PNAS 84:7856-7860). Carboxylation and y-carboxylation of FVII polypeptides can be assessed using mass spectrometry with matrix-assisted laser desorption ionization time-of-flight (MALDI-TOF) analysis, as described in the art (se, e.g. Harvey et al. J Biol Chem 278:8363-8369, Maum et al. Prot Sci 14:1171-1180). The interaction of a FVII polypeptide containing the propeptide (pro-FVII) with the carboxylase responsible for post-translational y-carboxylate modification also can be assessed. The dissociation constant (K_{d}) following incubation of carboxylase with fluorescin-labeled pro-FVII polypeptides can be measured by determining the amount of bound carboxylase by anisotropy (Lin et al. (2004) J Biol Chem 279:6560-6566).

[0393] b. Proteolytic Activity

[0394] Modified FVII polypeptides can be tested for proteolytic activity. The proteolytic activity of FVII can be measured using chromogenic substrates such as Chromozym t-PA (MeSO₂-D-Phe-Gly-Arg-pNA), S-2288 (H-D-Ile-Pro-Arg-pNA), S-2266 (H-D-Val-Leu-Arg-pNA), S-2765 (Z-D-Arg-Gly-Arg-pNA), Spectrozyme FXa and Spectrozyme FVIIa (CH3SO2-D-CHA-But-Arg-pNA). FVII polypeptides, alone or in the presence of TF, are incubated with varying concentrations of chromogenic substrate. Cleavage of the substrate can be monitored by absorbance and the rate of substrate hydrolysis determined by linear regression using software readily available.

[0395] The activation of coagulation factor substrates, such as FX, by FVII polypeptides also can be assessed. FVII polypeptides, with or without preincubation with TF, can be incubated with purified FX (available commercially). The amount of active FXa produced as a consequence of incubation with FVII polypeptides is measured as activity of FXa for a chromogenic substrate, such as S-2222 or Spectrafluor FXa (CH3SO2-D-CHA-Gly-Arg-AMC.AcOH), which is monitored via absorbance changes (Harvey et al. J Biol Chem 278:8363-8369, see also Example 5 below). A source of phospholipid also can be included in the incubation of FVII and FX (Nelsestuen et al. (2001) J Biol Chem 276:39825-31).

[0396] c. Coagulation Activity

[0397] FVII polypeptides can be tested for coagulation activity by using assays well known in the art. For example, some of the assays include, but are not limited to, a two stage clotting assay (Leibman et al., (1985) PNAS 82:3879-3883); the prothrombin time assay (PT, which can measure TF-dependent activity of FVIIa in the extrinsic pathway); assays which are modifications of the PT test; the activated partial thromboplastin time (aPTT, which can measure TF-independent activity of FVIIa); activated clotting time (ACT); recalcified activated clotting time; the Lee-White Clotting time; or thromboelastography (TEG) (Pusateri et al. (2005) Critical Care 9:S15-S24). For example, coagulation activity of a modified FVII polypeptide can be determined by a PT-based assay where FVII is diluted in FVII-deficient plasma, and mixed with prothrombin time reagent (recombinant TF with phospholipids and calcium), such as that available as Innovin™ from Dade Behring. Clot formation is detected optically and time to clot is determined and compared against FVII-deficient plasma alone.

[0398] d. Binding to and/or Inhibition by Other Proteins

[0399] Inhibition assays can be used to measure resistance of modified FVII polypeptides to FVII inhibitors, such as, for example, TFPI and AT-III, or molecules such as Zn²⁺. Assessment of inhibition to other inhibitors also can be tested and include, but are not limited to, other serine protease inhibitors, and FVII-specific antibodies. Inhibition can be assessed by incubation of, for example, TFPI, AT-III or Zn²⁺ with FVII polypeptides that have been preincubated with TF. The activity of FVII can then be measured using any one or more of the activity or coagulation assays described above, and inhibition by TFPI, AT-III or Zn²⁺ can be assessed by comparing the activity of FVII polypeptides incubated with the inhibitor, with the activity of FVII polypeptides that were not incubated with the inhibitor.

[0400] FVII polypeptides can be tested for binding to other coagulation factors and inhibitors. For example, FVII direct and indirect interactions with cofactors, such as TF, substrates, such as FX and FIX, and inhibitors, such as TFPI, antithrombin III and heparin can be assessed using any binding assay known in the art, including, but not limited to, immunoprecipitation, column purification, non-reducing SDS-PAGE, BIAcore® assays, surface plasmon resonance (SPR), fluorescence resonance energy transfer (FRET), fluorescence polarization (FP), isothermal titration calorimetry (ITC), circular dichroism (CD), protein fragment complementation assays (PCA), Nuclear Magnetic Resonance (NMR) spectroscopy, light scattering, sedimentation equilibrium, small-zone gel filtration chromatography, gel retardation, Far-western blotting, fluorescence polarization, hydroxyl-radical protein footprinting, phage display, and various two-hybrid systems. In one example, Zn²⁺ binding is assessed using equilibrium analysis (Petersen et al., (2000) Protein Science 9:859-866)

[0401] e. Phospholipid Affinity

[0402] Modified FVII polypeptide binding and/or affinity for phosphotidylserine (PS) and other phospholipids can be determined using assays well known in the art. Highly pure phospholipids (for example, known concentrations of bovine PS and egg phosphatidylcholine (PC), which are commercially available, such as from Sigma, in organic solvent can be used to prepare small unilamellar phospholipid vesicles. FVII polypeptide binding to these PS/PC vesicles can be determined by relative light scattering at 90° to the incident light. The intensity of the light scatter with PC/PS alone and with PC/PS/FVII is measured to determine the dissociation constant (Harvey et al. J Biol Chem 278:8363-8369). Surface plasma resonance, such as on a BIAcore biosensor instrument, also can be used to measure the affinity of FVII polypeptides for phospholipid membranes (Sun et al. Blood 101:2277-2284).

[0403] 2. Non-Human Animal Models

[0404] Non-human animal models can be used to assess activity, efficacy and safety of modified FVII polypeptides. For example, non-human animals can be used as models for a disease or condition. Non-human animals can be injected with disease and/or phenotype-inducing substances prior to administration of FVII variants, such as any FVII variant set forth in any of SEQ ID NOS: 18-43, 125-150 or 206-250, to monitor the effects on disease progression. Genetic models also are useful. Animals, such as mice, can be generated which mimic a disease or condition by the overexpression, underexpression or knock-out of one or more genes, such as, for example, factor VIII knock-out mice that display hemophilia A (Bi et al. (1995) Nat Gen 10:119-121). Such animals can be generated by transgenic animal production techniques well-known in the art or using naturally-occurring or induced mutant strains. Examples of useful non-human animal models of diseases associated with FVII include, but are not limited to, models of bleeding disorders, in particular hemophilia, or thrombotic disease. Non-human animal models for injury also can be used to assess an activity, such as the coagulation activity, of FVII polypeptides. These non-human animal models can be used to monitor activity of FVII variants compared to a wild type FVII polypeptide.

[0405] Animal models also can be used to monitor stability, half-life, and clearance of modified FVII polypeptides. Such assays are useful for comparing modified FVII polypeptides and for calculating doses and dose regimens for further non-human animal and human trials. For example, a modified FVII polypeptide, such as any FVII variant provided herein including, for example, any set forth in any of SEQ ID NOS: 18-43, 125-150 or 206-250, can be injected into the tail vein of mice. Blood samples are then taken at time-points after injection (such as minutes, hours and days afterwards) and then the level of the modified FVII polypeptides in bodily samples including, but not limited to, serum or plasma can be monitored at specific time-points for example by ELISA or radioimmunoassay. Blood samples from various time points following injection of the FVII polypeptides also be tested for coagulation activity using various methods methods, such as is described in Examples 9 and 14. These types of pharmacokinetic studies can provide information regarding half-life, clearance and stability of the FVII polypeptides, which can assist in determining suitable dosages for administration as a procoagulant.

[0406] Modified FVII polypeptides, such as any set forth in any of SEQ ID NOS: 18-43, 125-150 or 206-250, can be tested for therapeutic effectiveness using animal models for hemophilia. In one non-limiting example, an animal model such as a mouse can be used. Mouse models of hemophilia are available in the art and can be employed to test modified FVII polypeptides. For example, a mouse model of hemophilia A that is produced by injection with anti-FVIII antibodies can be used to assess the coagulant activity of FVII polypeptides (see e.g. Examples 8 and 14, and Tranholm et al. Blood (2003)102:3615-3620). A mouse model of hemophilia B also can be used to test FVII polypeptides (Margaritis et al. (2004) J Clin Invest 113:1025-1031). Non-mouse models of bleeding disorders also exist. FVII polypeptide activity can be assessed in rats with warfarin-induced bleeding or melagatran-induced bleeding (Diness et al. (1992) Thromb Res 67:233-241, Elg et al. (2001) Thromb Res 101:145-157), and rabbits with heparin-induced bleeding (Chan et al. (2003) J Thromb Haemost 1:760-765). Inbred hemophilia A, hemophilia B and von Willebrand disease dogs that display severe bleeding also can be used in non-human animal studies with FVII polypeptides (Brinkhous et al. (1989) PNAS 86:1382-1386). The activity of FVII polypeptides also can be assessed in a rabbit model of bleeding in which thrombocytopenia is induced by a combination of gamma-irradiation and the use of platelet antibodies (Tranholm et al. (2003) Thromb Res 109:217-223).

[0407] In addition to animals with generalized bleeding disorders, injury and trauma models also can be used to evaluate the activity of FVII polypeptides, and their safety and efficacy as a coagulant therapeutic. Non-limiting examples of such models include a rabbit coronary stenosis model (Fatorutto et al. (2004) Can J Anaesth 51:672-679), a grade V liver injury model in pigs (Lynn et al. (2002) J Trauma 52:703-707), a grade V liver injury model in pigs (Martinowitz et al. (2001) J Trauma 50:721-729) and a pig aortotomy model (Sondeem et al. (2004) Shock 22:163-168).

[0408] 3. Clinical Assays

[0409] Many assays are available to assess activity of FVII for clinical use. Such assays can include assessment of coagulation, protein stability and half-life in vivo, and phenotypic assays. Phenotypic assays and assays to assess the therapeutic effect of FVII treatment include assessment of blood levels of FVII (e.g. measurement of serum FVII prior to administration and time-points following administrations including, after the first administration, immediately after last administration, and time-points in between, correcting for the body mass index (BMI)), assessment of blood coagulation in vitro using the methods described above following treatment with FVII (e.g. PT assay), and phenotypic response to FVII treatment including amelioration of symptoms over time compared to subjects treated with an unmodified and/or wild type FVII or placebo. Patients treated with FVII polypeptides can be monitored for blood loss, transfusion requirement, and hemoglobin. Patients can be monitored regularly over a period of time for routine or repeated administrations, or following administration in response to acute events, such as hemorrhage, trauma, or surgical procedures.

### H. Formulation and Administration

[0410] Compositions for use in treatment of bleeding disorders are provided herein. Such compositions contain a therapeutically effective amount of a factor VII polypeptide as described herein. Effective concentrations of FVII polypeptides or pharmaceutically acceptable derivatives thereof are mixed with a suitable pharmaceutical carrier or vehicle for systemic, topical or local administration. Compounds are included in an amount effective for treating the selected disorder. The concentration of active compound in the composition will depend on absorption, inactivation, excretion rates of the active compound, the dosage schedule, and amount administered as well as other factors known to those of skill in the art.

[0411] Pharmaceutical carriers or vehicles suitable for administration of the compounds provided herein include any such carriers known to those skilled in the art to be suitable for the particular mode of administration. Pharmaceutical compositions that include a therapeutically effective amount of a FVII polypeptide described herein also can be provided as a lyophilized powder that is reconstituted, such as with sterile water, immediately prior to administration.

[0412] 1. Formulations

[0413] Pharmaceutical compositions containing a modified FVII can be formulated in any conventional manner by mixing a selected amount of the polypeptide with one or more physiologically acceptable carriers or excipients. Selection of the carrier or excipient is within the skill of the administering profession and can depend upon a number of parameters. These include, for example, the mode of administration (i.e., systemic, oral, nasal, pulmonary, local, topical, or any other mode) and disorder treated. The pharmaceutical compositions provided herein can be formulated for single dosage (direct) administration or for dilution or other modification. The concentrations of the compounds in the formulations are effective for delivery of an amount, upon administration, that is effective for the intended treatment. Typically, the compositions are formulated for single dosage administration. To formulate a composition, the weight fraction of a compound or mixture thereof is dissolved, suspended, dispersed, or otherwise mixed in a selected vehicle at an effective concentration such that the treated condition is relieved or ameliorated.

[0414] The modified FVII polypeptides provided herein can be formulated for administration to a subject as a two-chain FVIIa protein. The modified FVII polypeptides can be activated by any method known in the art prior to formulation. For example, FVII can undergo autoactivation during purification by ion exchange chromatography (Jurlander et al. (2001) Semin Thromb Hemost 27:373-384). The modified FVII polypeptides also can be activated by incubation with FXa immobilized on beads (Kemball-Cook et al. (1998) J Biol Chem 273:8516-8521), or any other methods known in the art (see also Example 3 below). The inclusion of calcium in these processes ensures full activation and correct folding of the modified FVIIa protein. The modified FVII polypeptides provided herein also can be formulated for administration as a single chain protein. The single-chain FVII polypeptides can be purified in such a way as to prevent cleavage (see, e.g., U.S. Pat. No. 6,677,440). The modified FVII polypeptides provided herein can be formulated such that the single-chain and two-chain forms are contained in the pharmaceutical composition, in any ratio by appropriate selection of the medium to eliminate or control autoactivation.

[0415] The compound can be suspended in micronized or other suitable form or can be derivatized to produce a more soluble active product. The form of the resulting mixture depends upon a number of factors, including the intended mode of administration and the solubility of the compound in the selected carrier or vehicle. The resulting mixtures are solutions, suspensions, emulsions and other such mixtures, and can be formulated as an non-aqueous or aqueous mixture, creams, gels, ointments, emulsions, solutions, elixirs, lotions, suspensions, tinctures, pastes, foams, aerosols, irrigations, sprays, suppositories, bandages, or any other formulation suitable for systemic, topical or local administration. For local internal administration, such as, intramuscular, parenteral or intra-articular administration, the polypeptides can be formulated as a solution suspension in an aqueous-based medium, such as isotonically buffered saline or are combined with a biocompatible support or bioadhesive intended for internal administration. The effective concentration is sufficient for ameliorating the targeted condition and can be empirically determined. To formulate a composition, the weight fraction of compound is dissolved, suspended, dispersed, or otherwise mixed in a selected vehicle at an effective concentration such that the targeted condition is relieved or ameliorated.

[0416] Generally, pharmaceutically acceptable compositions are prepared in view of approvals for a regulatory agency or other prepared in accordance with generally recognized pharmacopeia for use in animals and in humans. Pharmaceutical compositions can include carriers such as a diluent, adjuvant, excipient, or vehicle with which an isoform is administered. Such pharmaceutical carriers can be sterile liquids, such as water and oils, including those of petroleum, animal, vegetable or synthetic origin, such as peanut oil, soybean oil, mineral oil, and sesame oil. Water is a typical carrier when the pharmaceutical composition is administered intravenously. Saline solutions and aqueous dextrose and glycerol solutions also can be employed as liquid carriers, particularly for injectable solutions. Compositions can contain along with an active ingredient: a diluent such as lactose, sucrose, dicalcium phosphate, or carboxymethylcellulose; a lubricant, such as magnesium stearate, calcium stearate and talc; and a binder such as starch, natural gums, such as gum acaciagelatin, glucose, molasses, polyinylpyrrolidine, celluloses and derivatives thereof, povidone, crospovidones and other such binders known to those of skill in the art. Suitable pharmaceutical excipients include starch, glucose, lactose, sucrose, gelatin, malt, rice, flour, chalk, silica gel, sodium stearate, glycerol monostearate, talc, sodium chloride, dried skim milk, glycerol, propylene, glycol, water, and ethanol. A composition, if desired, also can contain minor amounts of wetting or emulsifying agents, or pH buffering agents, for example, acetate, sodium citrate, cyclodextrine derivatives, sorbitan monolaurate, triethanolamine sodium acetate, triethanolamine oleate, and other such agents. These compositions can take the form of solutions, suspensions, emulsion, tablets, pills, capsules, powders, and sustained release formulations. Capsules and cartridges of e.g., gelatin for use in an inhaler or insufflator can be formulated containing a powder mix of a therapeutic compound and a suitable powder base such as lactose or starch. A composition can be formulated as a suppository, with traditional binders and carriers such as triglycerides. Oral formulation can include standard carriers such as pharmaceutical grades of mannitol, lactose, starch, magnesium stearate, sodium saccharine, cellulose, magnesium carbonate, and other such agents. Preparations for oral administration also can be suitably formulated with protease inhibitors, such as a Bowman-Birk inhibitor, a conjugated Bowman-Birk inhibitor, aprotinin and camostat. Examples of suitable pharmaceutical carriers are described in “Remington's Pharmaceutical Sciences” by E. W. Martin. Such compositions will contain a therapeutically effective amount of the compound, generally in purified form, together with a suitable amount of carrier so as to provide the form for proper administration to a subject or patient.

[0417] The formulation should suit the mode of administration. For example, the modified FVII can be formulated for parenteral administration by injection (e.g., by bolus injection or continuous infusion). The injectable compositions can take such forms as suspensions, solutions or emulsions in oily or aqueous vehicles. The sterile injectable preparation also can be a sterile injectable solution or suspension in a non-toxic parenterally-acceptable diluent or solvent, for example, as a solution in 1-4, butanediol. Sterile, fixed oils are conventionally employed as a solvent or suspending medium. For this purpose any bland fixed oil can be employed, including, but not limited to, synthetic mono- or diglycerides, fatty acids (including oleic acid), naturally occurring vegetable oils like sesame oil, coconut oil, peanut oil, cottonseed oil, and other oils, or synthetic fatty vehicles like ethyl oleate. Buffers, preservatives, antioxidants, and the suitable ingredients, can be incorporated as required, or, alternatively, can comprise the formulation.

[0418] The polypeptides can be formulated as the sole pharmaceutically active ingredient in the composition or can be combined with other active ingredients. The polypeptides can be targeted for delivery, such as by conjugation to a targeting agent, such as an antibody. Liposomal suspensions, including tissue-targeted liposomes, also can be suitable as pharmaceutically acceptable carriers. These can be prepared according to methods known to those skilled in the art. For example, liposome formulations can be prepared as described in U.S. Pat. No. 4,522,811. Liposomal delivery also can include slow release formulations, including pharmaceutical matrices such as collagen gels and liposomes modified with fibronectin (see, for example, Weiner et al. (1985) J Pharm Sci. 74(9): 922-5). The compositions provided herein further can contain one or more adjuvants that facilitate delivery, such as, but are not limited to, inert carriers, or colloidal dispersion systems. Representative and non-limiting examples of such inert carriers can be selected from water, isopropyl alcohol, gaseous fluorocarbons, ethyl alcohol, polyvinyl pyrrolidone, propylene glycol, a gel-producing material, stearyl alcohol, stearic acid, spermaceti, sorbitan monooleate, methylcellulose, as well as suitable combinations of two or more thereof. The active compound is included in the pharmaceutically acceptable carrier in an amount sufficient to exert a therapeutically useful effect in the absence of undesirable side effects on the subject treated. The therapeutically effective concentration can be determined empirically by testing the compounds in known in vitro and in vivo systems, such as the assays provided herein.

[0419] a. Dosages

[0420] The precise amount or dose of the therapeutic agent administered depends on the particular FVII polypeptide, the route of administration, and other considerations, such as the severity of the disease and the weight and general state of the subject. Local administration of the therapeutic agent will typically require a smaller dosage than any mode of systemic administration, although the local concentration of the therapeutic agent can, in some cases, be higher following local administration than can be achieved with safety upon systemic administration. If necessary, a particular dosage and duration and treatment protocol can be empirically determined or extrapolated. For example, exemplary doses of recombinant and native FVII polypeptides can be used as a starting point to determine appropriate dosages. For example, a recombinant FVII (rFVIIa) polypeptide that has been activated to rFVIIa, Novoseven®, has been administered to patients with hemophilia A or hemophilia B, who are experiencing a bleeding episode, at a dosage of 90 μg/kg by bolus infusion over 2 to 5 minutes, achieving an effective circulating level of at least 2 μg/ml. The dose is repeated every 2 hours until hemostasis is achieved. The modified FVII polypeptides provided herein can be effective at reduced dosage amounts and/or frequencies compared to such a recombinant FVII. For example, at the modified FVII polypeptides provided herein can be administered at a dosage of 80 μg/kg, 70 μg/kg, 60 μg/kg, 50 μg/kg, 40 μg/kg, 30 μg/kg, 20 μg/kg, 15 μg/kg or less. In some embodiments, the dosages can be higher, such as 100 μg/kg, 110 μg/kg, 120 μg/kg, or higher. The duration of treatment and the interval between injections will vary with the severity of the bleed and the response of the patient to the treatment, and can be adjusted accordingly. Factors such as the level of activity and half-life of the modified FVII in comparison to the unmodified FVII can be taken into account when making dosage determinations. Particular dosages and regimens can be empirically determined.

[0421] In another example, a recombinant FVII (rFVIIa) polypeptide that has been activated to rFVIIa, Novoseven®, has been administered to patients with congenital FVII deficiency who are experiencing a bleeding episode, at a dosage of 15-30 μg/kg by bolus infusion over 2 to 5 minutes. The dose is repeated every 4-6 hours until hemostasis is achieved. The modified FVII polypeptides provided herein can be effective at reduced dosage amounts and/or frequencies compared to such a recombinant FVII. For example, the modified FVII polypeptides provided herein can be administered at a dosage of 20 μg/kg, 15 μg/kg, 10 μg/kg, 5 μg/kg, 3 μg/kg or less. In some examples, the dosages can be higher, such as 35 μg/kg, 40 μg/kg, 45 μg/kg, or higher. The duration of treatment and the interval between injections will vary with the severity of the bleed and the response of the patient to the treatment, and can be adjusted accordingly. Factors such as the level of activity and half-life of the modified FVII in comparison to the unmodified FVII can be used in making dosage determinations. For example, a modified FVII polypeptide that exhibits a longer half-life than an unmodified FVII polypeptide can be administered at lower doses and/or less frequently than the unmodified FVII polypeptide. Similarly, the dosages required for therapeutic effect using a modified FVII polypeptide that displays increased coagulant activity compared with an unmodified FVII polypeptide can be reduced in frequency and amount. Particular dosages and regimens can be empirically determined by one of skill in the art.

[0422] b. Dosage Forms

[0423] Pharmaceutical therapeutically active compounds and derivatives thereof are typically formulated and administered in unit dosage forms or multiple dosage forms. Formulations can be provided for administration to humans and animals in dosage forms that include, but are not limited to, tablets, capsules, pills, powders, granules, sterile parenteral solutions or suspensions, oral solutions or suspensions, and oil water emulsions containing suitable quantities of the compounds or pharmaceutically acceptable derivatives thereof. Each unit dose contains a predetermined quantity of therapeutically active compound sufficient to produce the desired therapeutic effect, in association with the required pharmaceutical carrier, vehicle or diluent. Examples of unit dose forms include ampoules and syringes and individually packaged tablets or capsules. In some examples, the unit dose is provided as a lyophilized powder that is reconstituted prior to administration. For example, a FVII polypeptide can be provided as lyophilized powder that is reconstituted with a suitable solution to generate a single dose solution for injection. In some embodiments, the lyophilized powder can contain the FVII polypeptide and additional components, such as salts, such that reconstitution with sterile distilled water results in a FVII polypeptide in a buffered or saline solution. Unit dose forms can be administered in fractions or multiples thereof. A multiple dose form is a plurality of identical unit dosage forms packaged in a single container to be administered in segregated unit dose form. Examples of multiple dose forms include vials, bottles of tablets or capsules or bottles of pints or gallons. Hence, multiple dose form is a multiple of unit doses that are not segregated in packaging.

[0424] 2. Administration of Modified FVII Polypeptides

[0425] The FVII polypeptides provided herein (i.e. active compounds) can be administered in vitro, ex vivo, or in vivo by contacting a mixture, such as a body fluid or other tissue sample, with a FVII polypeptide. For example, when administering a compound ex vivo, a body fluid or tissue sample from a subject can be contacted with the FVII polypeptides that are coated on a tube or filter, such as for example, a tube or filter in a bypass machine. When administering in vivo, the active compounds can be administered by any appropriate route, for example, orally, nasally, pulmonary, parenterally, intravenously, intradermally, subcutaneously, intraarticularly, intracistemally, intraocularly, intraventricularly, intrathecally, intramuscularly, intraperitoneally, intratracheally or topically, as well as by any combination of any two or more thereof, in liquid, semi-liquid or solid form and are formulated in a manner suitable for each route of administration. The modified FVII polypeptides can be administered once or more than once, such as twice, three times, four times, or any number of times that are required to achieve a therapeutic effect. Multiple administrations can be effected via any route or combination of routes, and can be administered hourly, every 2 hours, every three hours, every four hours or more.

[0426] The most suitable route for administration will vary depending upon the disease state to be treated, for example the location of the bleeding disorder. Generally, the FVII polypeptides will be administered by intravenous bolus injection, with an administration (infusing) time of approximately 2-5 minutes. In other examples, desirable blood levels of FVII can be maintained by a continuous infusion of the active agent as ascertained by plasma levels. It should be noted that the attending physician would know how to and when to terminate, interrupt or adjust therapy to lower dosage due to toxicity, or bone marrow, liver or kidney dysfunctions. Conversely, the attending physician would also know how to and when to adjust treatment to higher levels if the clinical response is not adequate (precluding toxic side effects). In other examples, the location of the bleeding disorder might indicate that the FVII formulation is administered via alternative routes. For example, local administration, including administration into the brain (e.g., intraventricularly) might be performed when the patient is experiencing bleeding in this region. Similarly, for treatment of bleeding in the joints, local administration by injection of the therapeutic agent into the joint (i.e., intraarticularly, intravenous or subcutaneous means) can be employed. In other examples, topical administration of the therapeutic agent to the skin, for example formulated as a cream, gel, or ointment, or administration to the lungs by inhalation or intratracheally, might be appropriate when the bleeding is localized to these areas.

[0427] The instances where the modified FVII polypeptides are be formulated as a depot preparation, the long-acting formulations can be administered by implantation (for example, subcutaneously or intramuscularly) or by intramuscular injection. Thus, for example, the therapeutic compounds can be formulated with suitable polymeric or hydrophobic materials (for example as an emulsion in an acceptable oil) or ion exchange resins, or as sparingly soluble derivatives, for example, as a sparingly soluble salt.

[0428] The compositions, if desired, can be presented in a package, in a kit or dispenser device, that can contain one or more unit dosage forms containing the active ingredient. The package, for example, contains metal or plastic foil, such as a blister pack. The pack or dispenser device can be accompanied by instructions for administration. The compositions containing the active agents can be packaged as articles of manufacture containing packaging material, an agent provided herein, and a label that indicates the disorder for which the agent is provided.

[0429] 3. Administration of Nucleic Acids Encoding Modified FVII Polypeptides (Gene Therapy)

[0430] Also provided are compositions of nucleic acid molecules encoding the modified FVII polypeptides and expression vectors encoding them that are suitable for gene therapy. Rather than deliver the protein, nucleic acid can be administered in vivo, such as systemically or by other route, or ex vivo, such as by removal of cells, including lymphocytes, introduction of the nucleic therein, and reintroduction into the host or a compatible recipient.

[0431] Modified FVII polypeptides can be delivered to cells and tissues by expression of nucleic acid molecules. Modified FVII polypeptides can be administered as nucleic acid molecules encoding modified FVII polypeptides, including ex vivo techniques and direct in vivo expression. Nucleic acids can be delivered to cells and tissues by any method known to those of skill in the art. The isolated nucleic acid sequences can be incorporated into vectors for further manipulation. As used herein, vector (or plasmid) refers to discrete elements that are used to introduce heterologous DNA into cells for either expression or replication thereof. Selection and use of such vehicles are well within the skill of the artisan.

[0432] Methods for administering modified FVII polypeptides by expression of encoding nucleic acid molecules include administration of recombinant vectors. The vector can be designed to remain episomal, such as by inclusion of an origin of replication or can be designed to integrate into a chromosome in the cell. Modified FVII polypeptides also can be used in ex vivo gene expression therapy using non-viral vectors. For example, cells can be engineered to express a modified FVII polypeptide, such as by integrating a modified FVII polypeptide encoding-nucleic acid into a genomic location, either operatively linked to regulatory sequences or such that it is placed operatively linked to regulatory sequences in a genomic location. Such cells then can be administered locally or systemically to a subject, such as a patient in need of treatment.

[0433] Viral vectors, include, for example adenoviruses, adeno-associated viruses (AAV), poxviruses, herpes viruses, retroviruses and others designed for gene therapy can be employed. The vectors can remain episomal or can integrate into chromosomes of the treated subject. A modified FVII polypeptide can be expressed by a virus, which is administered to a subject in need of treatment. Viral vectors suitable for gene therapy include adenovirus, adeno-associated virus (AAV), retroviruses, lentiviruses, vaccinia viruses and others noted above. For example, adenovirus expression technology is well-known in the art and adenovirus production and administration methods also are well known. Adenovirus serotypes are available, for example, from the American Type Culture Collection (ATCC, Rockville, Md.). Adenovirus can be used ex vivo, for example, cells are isolated from a patient in need of treatment, and transduced with a modified FVII polypeptide-expressing adenovirus vector. After a suitable culturing period, the transduced cells are administered to a subject, locally and/or systemically. Alternatively, modified FVII polypeptide-expressing adenovirus particles are isolated and formulated in a pharmaceutically-acceptable carrier for delivery of a therapeutically effective amount to prevent, treat or ameliorate a disease or condition of a subject. Typically, adenovirus particles are delivered at a dose ranging from 1 particle to 10¹⁴ particles per kilogram subject weight, generally between 10⁶ or 10⁸ particles to 10¹² particles per kilogram subject weight. In some situations it is desirable to provide a nucleic acid source with an agent that targets cells, such as an antibody specific for a cell surface membrane protein or a target cell, or a ligand for a receptor on a target cell. FVII also can be targeted for delivery into specific cell types. For example, adenoviral vectors encoding FVII polypeptides can be used for stable expression in nondividing cells, such as liver cells (Margaritis et al. (2004) J Clin Invest 113:1025-1031). In another example, viral or nonviral vectors encoding FVII polypeptides can be transduced into isolated cells for subsequent delivery. Additional cell types for expression and delivery of FVII might include, but are not limited to, fibroblasts and endothelial cells.

[0434] The nucleic acid molecules can be introduced into artificial chromosomes and other non-viral vectors. Artificial chromosomes, such as ACES (see, Lindenbaum et al. (2004) Nucleic Acids Res. 32(21):e172) can be engineered to encode and express the isoform. Briefly, mammalian artificial chromosomes (MACs) provide a means to introduce large payloads of genetic information into the cell in an autonomously replicating, non-integrating format. Unique among MACs, the mammalian satellite DNA-based Artificial Chromosome Expression (ACE) can be reproducibly generated de novo in cell lines of different species and readily purified from the host cells' chromosomes. Purified mammalian ACEs can then be re-introduced into a variety of recipient cell lines where they have been stably maintained for extended periods in the absence of selective pressure using an ACE System. Using this approach, specific loading of one or two gene targets has been achieved in LMTK(−) and CHO cells.

[0435] Another method for introducing nucleic acids encoding the modified FVII polypeptides is a two-step gene replacement technique in yeast, starting with a complete adenovirus genome (Ad2; Ketner et al. (1994) PNAS 91: 6186-6190) cloned in a Yeast Artificial Chromosome (YAC) and a plasmid containing adenovirus sequences to target a specific region in the YAC clone, an expression cassette for the gene of interest and a positive and negative selectable marker. YACs are of particular interest because they permit incorporation of larger genes. This approach can be used for construction of adenovirus-based vectors bearing nucleic acids encoding any of the described modified FVII polypeptides for gene transfer to mammalian cells or whole animals.

[0436] The nucleic acids can be encapsulated in a vehicle, such as a liposome, or introduced into a cells, such as a bacterial cell, particularly an attenuated bacterium or introduced into a viral vector. For example, when liposomes are employed, proteins that bind to a cell surface membrane protein associated with endocytosis can be used for targeting and/or to facilitate uptake, e.g. capsid proteins or fragments thereof tropic for a particular cell type, antibodies for proteins which undergo internalization in cycling, and proteins that target intracellular localization and enhance intracellular half-life.

[0437] For ex vivo and in vivo methods, nucleic acid molecules encoding the modified FVII polypeptide is introduced into cells that are from a suitable donor or the subject to be treated. Cells into which a nucleic acid can be introduced for purposes of therapy include, for example, any desired, available cell type appropriate for the disease or condition to be treated, including but not limited to epithelial cells, endothelial cells, keratinocytes, fibroblasts, muscle cells, hepatocytes; blood cells such as T lymphocytes, B lymphocytes, monocytes, macrophages, neutrophils, eosinophils, megakaryocytes, granulocytes; various stem or progenitor cells, in particular hematopoietic stem or progenitor cells, e.g., such as stem cells obtained from bone marrow, umbilical cord blood, peripheral blood, fetal liver, and other sources thereof.

[0438] For ex vivo treatment, cells from a donor compatible with the subject to be treated or the subject to be treated cells are removed, the nucleic acid is introduced into these isolated cells and the modified cells are administered to the subject. Treatment includes direct administration, such as, for example, encapsulated within porous membranes, which are implanted into the patient (see, e.g., U.S. Pat. Nos. 4,892,538 and 5,283,187 each of which is herein incorporated by reference in its entirety). Techniques suitable for the transfer of nucleic acid into mammalian cells in vitro include the use of liposomes and cationic lipids (e.g., DOTMA, DOPE and DC-Chol) electroporation, microinjection, cell fusion, DEAE-dextran, and calcium phosphate precipitation methods. Methods of DNA delivery can be used to express modified FVII polypeptides in vivo. Such methods include liposome delivery of nucleic acids and naked DNA delivery, including local and systemic delivery such as using electroporation, ultrasound and calcium-phosphate delivery. Other techniques include microinjection, cell fusion, chromosome-mediated gene transfer, microcell-mediated gene transfer and spheroplast fusion.

[0439] In vivo expression of a modified FVII polypeptide can be linked to expression of additional molecules. For example, expression of a modified FVII polypeptide can be linked with expression of a cytotoxic product such as in an engineered virus or expressed in a cytotoxic virus. Such viruses can be targeted to a particular cell type that is a target for a therapeutic effect. The expressed modified FVII polypeptide can be used to enhance the cytotoxicity of the virus.

[0440] In vivo expression of a modified FVII polypeptide can include operatively linking a modified FVII polypeptide encoding nucleic acid molecule to specific regulatory sequences such as a cell-specific or tissue-specific promoter. Modified FVII polypeptides also can be expressed from vectors that specifically infect and/or replicate in target cell types and/or tissues. Inducible promoters can be use to selectively regulate modified FVII polypeptide expression. An exemplary regulatable expression system is the doxycycline-inducible gene expression system, which has been used to regulate recombinant FVII expression (Srour et al. (2003) Thromb Haemost. 90(3): 398-405).

[0441] Nucleic acid molecules, as naked nucleic acids or in vectors, artificial chromosomes, liposomes and other vehicles can be administered to the subject by systemic administration, topical, local and other routes of administration. When systemic and in vivo, the nucleic acid molecule or vehicle containing the nucleic acid molecule can be targeted to a cell.

[0442] Administration also can be direct, such as by administration of a vector or cells that typically targets a cell or tissue. For example, tumor cells and proliferating can be targeted cells for in vivo expression of modified FVII polypeptides. Cells used for in vivo expression of an modified FVII polypeptide also include cells autologous to the patient. Such cells can be removed from a patient, nucleic acids for expression of an modified FVII polypeptide introduced, and then administered to a patient such as by injection or engraftment.

### I. Therapeutic Uses

[0443] The modified FVII polypeptides provided herein can be used for treatment of any condition for which recombinant FVII is employed. Typically, such treatments include those where increased coagulation, such as increased hemostatic responses, are desired. Modified FVII polypeptides have therapeutic activity alone or in combination with other agents. The modified polypeptides provided herein are designed to retain therapeutic activity but exhibit modified properties, particularly increased resistance to TFPI, increased resistance to AT-III, increased catalytic activity, increased half-life and/or increased binding and/or affinity for activated platelets. Such modified properties, for example, can improve the therapeutic effectiveness of the polypeptides due to increased coagulant activity of the modified FVII polypeptides. This section provides exemplary uses of and administration methods. These described therapies are exemplary and do not limit the applications of modified FVII polypeptides.

[0444] The modified FVII polypeptides provided herein can be used in various therapeutic as well as diagnostic methods in which FVII is employed. Such methods include, but are not limited to, methods of treatment of physiological and medical conditions described and listed below. Modified FVII polypeptides provided herein can exhibit improvement of in vivo activities and therapeutic effects compared to wild-type FVII, including lower dosage to achieve the same effect, and other improvements in administration and treatment such as fewer and/or less frequent administrations, decreased side effects and increased therapeutic effects. Although it is understood that the modified FVII polypeptides can be administered as a FVII zymogen (i.e. single chain form), typically the modified FVII polypeptides provided herein are administered in activated two-chain form following, for example, autoactivation or activation by other coagulation factors, such as during purification.

[0445] In particular, modified FVII polypeptides are intended for use in therapeutic methods in which FVII has been used for treatment. Such methods include, but are not limited to, methods of treatment of diseases and disorders, such as, but not limited to, blood coagulation disorders, hematologic disorders, hemorrhagic disorders, hemophilias, such as hemophilia A, hemophilia B and factor VII deficiency, and acquired blood disorders, such as acquired factor VII deficiency caused by liver disease. Modified FVII polypeptides also can be used in the treatment of additional bleeding diseases and disorders, such as, but not limited to, thrombocytopenia (e.g., such as due to chemotherapeutic regimes), Von Willebrand's disease, hereditary platelet disorders (e.g., storage pool disease such as Chediak-Higashi and Hermansky-Pudlak syndromes, thromboxane A2 dysfunction, Glanzmann's thrombasthenia, and Bernard-Soulier syndrome), hemolytic-uremic syndrome, Hereditary Hemorrhagic Telangiectsia, also known as Rendu-Osler-Weber syndrome, allergic purpura (Henoch Schonlein purpura) and disseminated intravascular coagulation.

[0446] In some embodiments, the bleedings to be treated by FVII polypeptides occur in organs such as the brain, inner ear region, eyes, liver, lung, tumor tissue, gastrointestinal tract. In other embodiments, the bleeding is diffuse, such as in haemorrhagic gastritis and profuse uterine bleeding. Patients with bleeding disorders, such as for example, hemophilia A and B, often are at risk of bleeding complications during surgery or trauma. Such bleeding can be manifested as acute haemarthroses (bleedings in joints), chronic hemophilic arthropathy, haematomas, (e.g., muscular, retroperitoneal, sublingual and retropharyngeal), haematuria (bleeding from the renal tract), central nervous system bleedings, gastrointestinal bleedings (e.g., UGI bleeds) and cerebral hemorrhage, which also can be treated with modified FVII polypeptides. Additionally, any bleeding associated with surgery (e.g., hepatectomy), or dental extraction can be treated with modified FVII polypeptides. In one embodiment, the modified FVII polypeptides can be used to treat bleeding episodes due to trauma, or surgery, or lowered count or activity of platelets, in a subject. Exemplary methods for patients undergoing surgery include treatments to prevent hemorrhage and treatments before, during, or after surgeries such as, but not limited to, heart surgery, angioplasty, lung surgery, abdominal surgery, spinal surgery, brain surgery, vascular surgery, dental surgery, or organ transplant surgery, including transplantation of bone marrow, heart, lung, pancreas, or liver.

[0447] Treatment of diseases and conditions with modified FVII polypeptides can be effected by any suitable route of administration using suitable formulations as described herein including, but not limited to, injection, pulmonary, oral and transdermal administration. Treatment typically is effected by intravenous bolus administration.

[0448] If necessary, a particular dosage and duration and treatment protocol can be empirically determined or extrapolated. For example, exemplary doses of recombinant and native FVII polypeptides can be used as a starting point to determine appropriate dosages. For example, a recombinant FVII (rFVIIa) polypeptide that has been activated to rFVIIa, Novoseven®, has been administered to patients with hemophilia A or hemophilia B, who are experiencing a bleeding episode, at a dosage of 90 μg/kg by bolus infusion over 2 to 5 minutes, achieving an effective circulating level of at least 2 μg/ml, with a mean half-life of 2.7 hours. The dose is repeated every 2 hours until hemostasis is achieved. Modified FVII polypeptides that are have an increased coagulant activity, due to increased resistance to TFPI, increased resistance to AT-III, increased catalytic activity, increased half-life and/or increased binding and/or affinity for activated platelets, can be effective at reduced dosage amounts and/or frequencies compared to such a recombinant FVII. Dosages for wild-type or unmodified FVII polypeptides can be used as guidance for determining dosages for modified FVII polypeptides. Factors such as the level of activity and half-life of the modified FVII in comparison to the unmodified FVII can be used in making such determinations. Particular dosages and regimens can be empirically determined.

[0449] Dosage levels and regimens can be determined based upon known dosages and regimens, and, if necessary can be extrapolated based upon the changes in properties of the modified polypeptides and/or can be determined empirically based on a variety of factors. Such factors include body weight of the individual, general health, age, the activity of the specific compound employed, sex, diet, time of administration, rate of excretion, drug combination, the severity and course of the disease, and the patient's disposition to the disease and the judgment of the treating physician. The active ingredient, the polypeptide, typically is combined with a pharmaceutically effective carrier. The amount of active ingredient that can be combined with the carrier materials to produce a single dosage form or multi-dosage form can vary depending upon the host treated and the particular mode of administration.

[0450] The effect of the FVII polypeptides on the clotting time of blood can be monitored using any of the clotting tests known in the art including, but not limited to, whole blood prothrombin time (PT), the activated partial thromboplastin time (aPTT), the activated clotting time (ACT), the recalcified activated clotting time, or the Lee-White Clotting time.

[0451] Upon improvement of a patient's condition, a maintenance dose of a compound or compositions can be administered, if necessary; and the dosage, the dosage form, or frequency of administration, or a combination thereof can be modified. In some cases, a subject can require intermittent treatment on a long-term basis upon any recurrence of disease symptoms or based upon scheduled dosages. In other cases, additional administrations can be required in response to acute events such as hemorrhage, trauma, or surgical procedures.

[0452] The following are some exemplary conditions for which FVII (administered as FVIIa) has been used as a treatment agent alone or in combination with other agents.

[0453] 1. Congenital Bleeding Disorders

[0454] a. Hemophilia

[0455] Congenital hemophilia is a recessive blood disorder in which there are decreased levels of coagulation factors in the plasma, leading to disruption of the coagulation cascade and increased blot clotting time. Hemophilia A, which accounts for approximately 85% of all cases of hemophilia, results from mutations(s) in the factor VIII gene on the X chromosome, leading to a deficiency or dysfunction of the FVIII protein. Hemophilia B is caused by a deficiency or dysfunction of the coagulation factor, FIX, generally resulting from point mutations or deletions in the FIX gene on X chromosome. The worldwide incidence of hemophilia A is approximately 1 case per 5000 male individuals, and 1 case per 25000 males for hemophilia B. Hemophilia A and B is further classified as mild, moderate, or severe. A plasma level with 5%-25% of normally functioning factor VIII or IX is classified as mild, 1%-5% is moderate, and less that 1% is severe. Hemophilia C, often referred to as FIX deficiency, is a relatively mild and rare disease, affecting about 1 in 100000 people in an autosomal recessive manner.

[0456] Hemophilia A and B manifests clinically in many ways. Minor cuts and abrasions will not result in excessive bleeding, but traumas and surgeries will. The patient also will have numerous joint and muscle bleeds and easy bruising. Hemarthrosis or bleeding into the joints is one of the major complications in hemophilia, and can occur spontaneously or in response to trauma. The hinge joints, such as the knee, elbow and ankle, are affected most frequently. The hip and shoulder are affected much less frequently as the ball and socket joint have more musculature surrounding them, thus protecting them more from injury. The bleeding can cause severe acute pain, restrict movement, and lead to secondary complications including synovial hypertrophy. Furthermore, the recurring bleeding in the joints can cause chronic synovitis, which can cause joint damage, destroying synovium, cartilage, and bone. Life-threatening hemorrhages, such as intracranial hemorrhage and bleeding in the central nervous system, also afflicts hemophilic subjects. Intracranial bleeding occurs in approximately 10% of patients with sever hemophilia, resulting in a 30% mortality rate. In contrast, Hemophilia C is more mild. Spontaneous bleeds are rarely seen, and bleeding into joints, soft tissues and muscles also is uncommon. Bleeding is generally treated with transfusion of fresh frozen plasma (FFP), FXI replacement therapy, or, for topical treatment, such treatment of external wounds or dental extractions, fibrin glue.

[0457] The most common treatment for hemophilia A or B is replacement therapy, in which the patient is administered FVIII or FIX. The formulations are available commercially as plasma-derived or recombinant products, with recombinant proteins now being the treatment of choice in previously untreated patients. While these therapies can be very successful, complications arise if the patient develops inhibitors to the newly administered factor VIII or factor IX. Inhibitors are IgG antibodies, mostly of the IgG4 subclass, that react with FVIII or FIX and interfere with pro-coagulant function. Inhibitors affect about 1 in 5 patients with severe hemophilia A. Most subjects develop these inhibitors soon after administration of the first infusions of factor VIII, which is often in early childhood, although subjects develop them later in life. Inhibitors also affect about 1 in 15 people with mild or moderate hemophilia A. These inhibitors usually develop during adulthood and not only destroy administered exogenous FVIII, but also destroy endogenous FVIII. As a result, mild and moderate hemophiliacs become severe. Clinically, hemophilia A patients with inhibitors are classified into high and low responders according to the strength of the anamnestic response they experience when they are re-exposed to FVIII. Inhibitors affect about 1 in 100 patients with hemophilia B. In most cases, the inhibitors develop after the first infusions of therapeutic factor IX and can be accompanied by allergic reactions.

[0458] The modified FVII polypeptides presented herein can be used to treat patients with hemophilia, particularly hemophilia patients with inhibitors. A recombinant FVIIa product (NovoSeven, Novo Nordisk) has been approved and licensed for the treatment of bleeding episodes in hemophilia A or B patients with inhibitors to FVIII or FIX and for the prevention of bleeding in surgical interventions or invasive procedures in hemophilia A or B patients with inhibitors to FVIII or FIX. Treatment with rFVIIa enhances thrombin generation while bypassing the requirement for FVIIIa and/or FIXa. Coagulation is initiated at the site of injury by the interaction of rFVIIa with TF, resulting in initial FX activation, thrombin generation, and activation of platelets. Complete coagulation by rFVIIa is can be effected by the TF-dependent and TF-independent mechanisms, where some of the thrombin generated can result from the direct activation of FX on activated platelets by rFVIIa alone, which itself binds activated platelets through low affinity interactions with the phospholipid membranes.

[0459] The modified FVII polypeptides provided herein can be used in therapies for hemophilia, including the treatment of bleeding episodes and the prevention of bleeding in surgical interventions or invasive procedures. The modified FVII polypeptides herein provide increased resistance to the TF/FVIIa complex inhibitor, TFPI, increased resistance to AT-III, increased catalytic activity, increased half-life and/or increased binding and/or affinity for activated platelets. The FVII polypeptides can therefore display higher coagulant activity in a TF-dependent manner (such as through increased resistance to TFPI), and/or a TF-independent manner (such as through increased binding and/or affinity for activated platelets). Thus, the modified FVII polypeptides can be used to deliver more active therapies for hemophilia. Examples of therapeutic improvements using modified FVII polypeptides include for example, but are not limited to, lower dosages, fewer and/or less frequent administrations, decreased side effects, and increased therapeutic effects.

[0460] The modified FVII polypeptides typically are administered as activated FVII (FVIIa) polypeptides. Modified FVII polypeptides can be tested for therapeutic effectiveness, for example, by using animal models. For example antibody-induced hemophilic mice, or any other known disease model for hemophilia, can be treated with modified FVII polypeptides. Progression of disease symptoms and phenotypes is monitored to assess the effects of the modified FVII polypeptides. Modified FVII polypeptides also can be administered to subjects such as in clinical trials to assess in vivo effectiveness in comparison to placebo controls and/or controls using unmodified FVII.

[0461] b. FVII Deficiency

[0462] Factor VII deficiency is an autosomal recessive bleeding disorder that affects approximately 1 in 500000 people. FVII deficiency can be clinically mild, moderate or severe, with mild to moderate deficiency characterized by increased bleeding after surgery and trauma. Patients with severe FVII deficiency (less than 1% FVII activity) experience similar symptoms to hemophilia. For example, FVII-deficient subjects are prone to joint bleeds joint bleeds, spontaneous nosebleeds, gastrointestinal bleeding, urinary tract bleeding. Intracerebral hemorrhaging and muscle bleeds have also been reported, while women can experience severe menorrhagia (heavy menstrual bleeding). Treatment can be effected by replacement therapy. A recombinant FVIIa product (NovoSeven®, Novo Nordisk) has been approved and licensed for the treatment of bleeding episodes in patients with congenital FVII deficiency and for the prevention of bleeding in surgical interventions or invasive procedures in patients with congenital FVII deficiency. Hence, the modified FVII polypeptides herein can be similarly used. The modified FVII polypeptides provided herein can be used in the treatment of bleeding episodes and the prevention of bleeding in surgical interventions or invasive procedures in FVII-deficient patients. For example, a neonatal patient presenting with severe FVII deficiency with intracranial hemorrhaging can be administered modified FVII polypeptides by intravenous bolus to effect coagulation and maintain hemostasis. Generally the modified FVII polypeptides are administered as activated FVII (FVIIa) polypeptides.

[0463] c. Others

[0464] Other bleeding disorders can be treated with the FVII polypeptides provided herein to promote coagulation. Congenital deficiencies of factors V and X also present with increased blood clotting times and can potentially be treated with administration of therapeutic doses of FVII. For example, a patient with factor X deficiency can be administered rFVIIa to control bleeding associated with splenectomy (Boggio et al. (2001) Br J Haematol 112:1074-1075). Spontaneous and surgery associated bleeding episodes associated with von Willebrand disease (vWD) also can be treated using the modified FVII polypeptides provided herein. VWD is a bleeding disorder caused by a defect or deficiency of the blood clotting protein, von Willebrand Factor (vWF), and is estimated to occur in 1% to 2% of the population. Subjects with vWD bruise easily, have recurrent nosebleeds, bleed after tooth extraction, tonsillectomy or other surgery, and women patients can have increased menstrual bleeding. Modified FVII polypeptides can be used to ameliorate spontaneous and surgery-associated bleeding in vWD patients (von Depka et al. (2006) Blood Coagul Fibrin 17:311-316). Other platelet-related bleeding disorders, such as for example, Glanzmann's thrombasthenia and Hermansky-Pudlak syndrome also are associated with reduced endogenous clotting activity. Excess spontaneous or surgery-associated bleeding in patients with platelet related bleeding disorders also can be controlled by therapeutic doses of the modified FVII polypeptides. For example, a patient with Glanzmann's thrombasthenia undergoing surgery can be treated before, during and/or after surgery with the modified FVII polypeptides to prevent major blood loss (van Buuren et al. (2002) Dig Dis Sci 47:2134-2136). Generally, the modified FVII polypeptides are administered as activated FVII (FVIIa) polypeptides.

[0465] 2. Acquired Bleeding Disorders

[0466] a. Chemotherapy-Acquired Thrombocytopenia

[0467] Bleeding disorders also can be acquired, rather than congenital. For example, chemotherapy treatment, such as for leukemia and other cancers, can result in thrombocytopenia. This is likely due to a loss of platelet production in the bone marrow of patients receiving chemotherapy, and typically occurs 6-10 days after medication. Treatment of the acquired thrombocytopenia is usually by platelet, red blood cell or plasma transfusion, which serves to prevent any abnormal spontaneous bleeding that can result from platelet deficiency. Bleeding in patients with chemotherapy-induced thrombocytopenia, or any other acquired or congenital thrombocytopenia, also can be controlled by administration of therapeutic amounts of the modified FVII polypeptides provided herein. For example, a thrombocytopenic patient with uncontrolled bleeding, such as in the gastrointestinal tract, can be administered an intravenous bolus injection of a therapeutic amount of FVII polypeptide to stop hemorrhaging (Gerotziafas et al. (2002) Am J Hematol 69:219-222). Generally, the modified FVII polypeptides are administered as activated FVII (FVIIa) polypeptides.

[0468] b. Other Coagulopathies

[0469] Other acquired coagulopathies can be treated using the modified FVII polypeptides presented herein. Coagulopathy can result from conditions including, but not limited to, fulminant hepatic failure (FHF; such as caused by hepatoxic drugs, toxins, metabolic diseases, infectious diseases and ischemia), other liver disease, including cirrhosis and disease associated with Wilson's disease, vitamin K deficiency (such as caused by antibiotic treatment or diet), hemolytic uremic syndrome, thrombotic thrombocytopenia (TTC) and disseminated intravascular coagulopathy (DIC). Conventional treatment is generally by transfusion with plasma, red blood cells (RBC), or platelets, but can be unsuccessful. In one embodiment, the modified FVII polypeptides can be administered to a patient with FHF undergoing invasive procedures to prevent bleeding. Conventional treatment with fresh frozen plasma (FFP) often is unsuccessful and can require large quantities of plasma, producing volume overload and anasarca (a generalized infiltration of edema fluid into subcutaneous connective tissue). Treatment with therapeutic amounts of modified FVII polypeptides by intravenous bolus during, before and/or after invasive surgery, such as for example, liver biopsy or liver transplantation, can prevent bleeding and establish hemostasis in FHF patients. The patient can be monitored by PT of the blood to determine the efficacy of treatment (Shami et al. (2003) Liver Transpl 9:138-143). In another embodiment, FVII can be administered to a patient with severe bleeding associated with coagulopathy, such as for example, severe post-cesarean intra-abdominal bleeding associated with liver dysfunction and DIC, that did not respond to conventional transfusions infusions (Moscardo et al. (2001) Br J Haematol 113:174-176). Further, the modified FVII polypeptides can be used to treat coagulopathy in neonatal and pediatric patients. In a particular embodiment, the neonatal and pediatric patients do not respond to conventional treatment, such as RBC and platelet infusion. For example, neonates with severe pulmonary hemorrhaging associated with increased PTs who do not respond to RBC and platelet transfusion can be administered modified FVII polypeptides to decrease PT and establish hemostasis (Olomu et al. (2002) J Perinatol 22:672-674). The modified FVII polypeptides provided herein exhibit enhanced coagulation activity compared with unmodified FVII polypeptides, and can therefore be administered, for example, at lower doses, less frequently, and with fewer adverse reactions. Generally the modified FVII polypeptides are administered as activated FVII (FVIIa) polypeptides.

[0470] c. Transplant-Acquired Bleeding

[0471] Severe bleeding following bone marrow transplant (BMT) and stem cell transplant (SCT) is a relatively common and life-threatening complication associated with these procedures, due to the reduction of platelets. For example, diffuse alveolar hemorrhage (DAH) is a pulmonary complication of BMT with an estimated incidence of 1-21% in the transplant population, and a mortality rate of 60-100%. Conventional treatment of such bleeding episodes includes corticosteroid treatment and transfusion with plasma, platelets and/or RBC, although these are largely unsuccessful with an overall mortality rate of approximately 50% (Hicks et al. (2002) Bone Marrow Transpl 30:975-978). Administration of FVII by intravenous bolus, with or without concurrent treatment with corticosteroids and/or platelet infusion, can be performed to treat DAH and establish hemostasis (Hicks et al. (2002) Bone Marrow Transpl 30:975-978). The modified FVII polypeptides provided herein exhibit enhanced coagulation activity compared with unmodified FVII polypeptides, and might therefore be administered, for example, at lower doses, less frequently, over a shorter treatment duration, and with fewer adverse reactions for the same biological activity and efficacy. Generally the modified FVII polypeptides are administered as activated FVII (FVIIa) polypeptides.

[0472] d. Anticoagulant Therapy-Induced Bleeding

[0473] Patients undergoing anticoagulant therapies for the treatment of conditions, such as thromboembolism, can exhibit bleeding episodes upon acute administration of anticoagulants, such as warfarin, heparin and fondaparinux, or develop hemorrhagic disorders as a result long term usage of such therapies. Treatments for bleeding episodes typically include administration of procoagulants, such as vitamin K, plasma, exogenous FIX, and protamines to neutralize heparin. Administration of exogenous FVII also can be performed to neutralize the effect of the anti-coagulants, increase PT, aPTT, and/or other markers of coagulation and establish hemostasis (Deveras et al. (2002) Ann Inten Med 137:884-888). The modified FVII polypeptides provided herein can be used in treatments to control bleeding episodes in patients with acquired bleeding disorders due to anticoagulant treatments. Generally the modified FVII polypeptides are administered as activated FVII (FVIIa) polypeptides.

[0474] e. Acquired Hemophilia

[0475] Factor VIII inhibitors can develop spontaneously in otherwise healthy individuals, resulting in a condition known as “acquired hemophilia”. Acquired hemophilia is a rare condition, with a yearly incidence of 0.2-1.0 per million population. The autoantibodies are mainly IgG4 antibodies, which, when bound to FVIII, inhibit FVIII activity by interfering with thrombin cleavage, von Willebrand factor interaction and/or phospholipid binding. This results in life-threatening hemorrhage in approximately 87% of affected patients. Common sites of bleeding are skin, mucosa, muscles and retroperitoneum, in contrast to patients with hereditary hemophilia who bleed predominantly in joints and muscles. Acquired hemophilia can be treated with an activated prothrombin complex concentrate or recombinant activated factor VII (NovoSeven®, Novo Nordisk) to control bleeding episodes. The modified FVII polypeptides provided herein exhibit enhanced coagulation activity compared with unmodified FVII polypeptides, and can therefore be administered, for example, at lower doses, less frequently, over a shorter treatment duration, and with fewer adverse reactions for the same biological activity and efficacy. Generally the modified FVII polypeptides are administered as activated FVII (FVIIa) polypeptides.

[0476] 3. Trauma and Surgical Bleeding

[0477] FVII polypeptides can be used as therapy to treat bleeding associated with perioperative and traumatic blood loss in subjects with normal coagulation systems. For example, FVII polypeptides can be administered to a patient to promote coagulation and reduce blood loss associated with surgery and, further, reduce the requirement for blood transfusion. In one embodiment, FVII polypeptides can be administered to subjects undergoing retropubic prostatectomy. Retropubic prostatectomy is often associated with major blood loss and a subsequent need for transfusion. Subjects undergoing such or similar surgery can be given an intravenous bolus of a therapeutic amount of FVII in the early operative phase to reduce perioperative blood loss by enhancing coagulation at the site of surgery. Reduction in blood loss results in elimination of the need for blood transfusion in these patients (Friederich et al. (2003) Lancet 361:201-205). FVII polypeptides can be administered to patients with normal coagulation undergoing other types of surgery to effect rapid hemostasis and prevent blood loss. Non-limiting examples of surgical procedures in which FVII, typically administered in the activated form (i.e. FVIIa), can be used a therapy to reduce perioperative bleeding include, but are not limited to, cardiac valve surgery (Al Douri et al. (2000) Blood Coag Fibrinol 11: S121-S127), aortic valve replacement (Kastrup et al. (2002) Ann Thorac Surg 74:910-912), resection of recurrent hemangiopericytoma (Gerlach et al. (2002) J Neurosurg 96:946-948), cancer surgery (Sajdak et al. (2002) Eur J Gynaecol Oncol 23:325-326), and surgery on duodenal ulcers (Vlot et al. (2000) Am J Med 108:421-423). Treatment with FVII can promote hemostasis at the site of surgery and reduce or prevent blood loss, thereby reducing or abolishing the need for transfusion. The modified FVII polypeptides provided herein are designed to exhibit enhanced coagulation activity compared with unmodified FVII polypeptides, and might therefore be administered, for example, at lower doses, less frequently, and with fewer adverse reactions. Generally the modified FVII polypeptides are administered as activated FVII (FVIIa) polypeptides.

[0478] Factor VII polypeptides also can be used to promote coagulation and prevent blood loss in subjects with traumatic injury. Trauma is defined as an injury to living tissue by an extrinsic agent, and is the fourth leading cause of death in the United States. Trauma is classified as either blunt trauma (resulting in internal compression, organ damage and internal hemorrhage) or penetrative trauma (a consequence of an agent penetrating the body and destroying tissue, vessel and organs, resulting in external hemorrhaging). Trauma can be caused by several events including, but not limited to, vehicle accidents (causing blunt and/or penetrative trauma), gun shot wounds (causing penetrative trauma), stabbing wounds (causing penetrative trauma), machinery accidents (causing penetrative and/or blunt trauma), and falls from significant heights (causing penetrative and/or blunt trauma). Uncontrolled hemorrhage as a result of trauma is responsible for most of the associated mortality. Diffuse coagulopathy is a relatively common complication associated with trauma patients, occurring in as many as 25-36% of subjects. Coagulopathy can develop early after injury, resulting from a variety of factors such as dilution and consumption of coagulation factors and platelets, fibrinolysis, acidosis, and hypothermia. Conventional management involves replacement therapy by transfusion with fresh frozen plasma (FFP) platelets, RBC and/or cryoprecipitate, correcting acidosis, and treating hypothermia. These steps often are insufficient to stop the bleeding and prevent death. Treatment by administration of therapeutic amounts of FVII can promote coagulation and reduce blood loss in trauma patients. For example, a patient with a gun shot injury presenting with massive blood, in addition to surgical intervention, be administered FVII to control coagulopathic bleeding (Kenet et al. (1999) Lancet 354:1879). Coagulant therapy with FVII can effectively reduce blood loss and hemorrhage in patients with blunt and penetrating trauma (Rizoli et al. (2006) Crit. Care 10:R178). The modified FVII polypeptides provided herein are designed to exhibit enhanced coagulation activity compared with unmodified FVII polypeptides, and might therefore be administered, for example, at lower doses, less frequently, and with fewer adverse reactions. Generally the modified FVII polypeptides are administered as activated FVII (FVIIa) polypeptides.

### J. Combination Therapies

[0479] Any of the modified FVII polypeptides described herein can be administered in combination with, prior to, intermittently with, or subsequent to, other therapeutic agents or procedures including, but not limited to, other biologics, small molecule compounds and surgery. For any disease or condition, including all those exemplified above, for which FVII (including FVIIa and rFVIIa) is indicated or has been used and for which other agents and treatments are available, FVII can be used in combination therewith. Hence, the modified FVII polypeptides provided herein similarly can be used. Depending on the disease or condition to be treated, exemplary combinations include, but are not limited to, combination with other plasma purified or recombinant coagulation factors, procoagulants, such as vitamin K, vitamin K derivative and protein C inhibitors, plasma, platelets, red blood cells and corticosteroids.

### K. Articles of Manufacture and Kits

[0480] Pharmaceutical compounds of modified FVII polypeptides or nucleic acids encoding modified FVII polypeptides, or a derivative or a biologically active portion thereof can be packaged as articles of manufacture containing packaging material, a pharmaceutical composition which is effective for treating a hemostatic disease or disorder, and a label that indicates that modified FVII polypeptide or nucleic acid molecule is to be used for treating hemostatic disease or disorder.

[0481] The articles of manufacture provided herein contain packaging materials. Packaging materials for use in packaging pharmaceutical products are well known to those of skill in the art. See, for example, U.S. Pat. Nos. 5,323,907, 5,052,558 and 5,033,352, each of which is incorporated herein in its entirety. Examples of pharmaceutical packaging materials include, but are not limited to, blister packs, bottles, tubes, inhalers, pumps, bags, vials, containers, syringes, bottles, and any packaging material suitable for a selected formulation and intended mode of administration and treatment. A wide array of formulations of the compounds and compositions provided herein are contemplated as are a variety of treatments for any hemostatic disease or disorder.

[0482] Modified FVII polypeptides and nucleic acid molecules also can be provided as kits. Kits can include a pharmaceutical composition described herein and an item for administration. For example a modified FVII can be supplied with a device for administration, such as a syringe, an inhaler, a dosage cup, a dropper, or an applicator. The kit can, optionally, include instructions for application including dosages, dosing regimens and instructions for modes of administration. Kits also can include a pharmaceutical composition described herein and an item for diagnosis. For example, such kits can include an item for measuring the concentration, amount or activity of FVII or a FVII regulated system of a subject.

[0483] The following examples are included for illustrative purposes only and are not intended to limit the scope of the invention.

### L. EXAMPLES

### Example 1

### In Silico Generation of Factor VII Variants with Increased Resistance to TFPI

[0484] A. Modeling of the Interaction Between Factor VII and TFPI

[0485] Computer modeling of the interaction between factor VII and its natural inhibitor, the first Kunitz domain (K1) on Tissue Factor Pathway Inhibitor (TFP1)-1 (TFPI-1 K1) was performed to determine the contact amino acid residues at the interface of the interaction site. Publicly available information from the protein data bank (rcsb.org/pdb/) was used to create the homology model. Neither the crystal structure for TFPI-1 K1 alone, nor of the quaternary complex between TF/FVIIa/TFPI-1/FXa, have yet been solved. Instead, computer modeling was performed using the 2.1 Å crystal structure of the ternary complex between TF, FVII and the 5L15 variant of bovine pancreatic trypsin inhibitor (BPTI^{5L15}; PDB code 1FAK) as a starting model for the process, followed by information about the crystal structure of the trypsin/TFPI-2 complex (FIG. 6). BPTI^{5L15} is a Kunitz domain-type serine protease, and displays homology to TFPI-1 and TFPI-2. The first Kunitz domain (K1) of BPTI^{5L15} (SEQ ID NO:106) displays 45% primary sequence identity in the first Kunitz domain (K1) (FIG. 5). The coordinates for the crystal structure of TFPI-2 K1 were extracted from the program database (pdb) file 1TFX from the protein data bank, which depicts the crystal structure of the trypsin/TFPI-2 complex. The TFPI-2 K1 coordinates were aligned onto the BPTI^{5L15} three-dimensional coordinates of the crystal structure of TF/FVIIA/BPTI^{5L15} (pdb file 1FAK1) using a rigid body c-α backbone alignment program in the PyMol software suite (pymol.sourceforge.net/). Analysis of the fit of TFPI-2 K1 into the model by measurement of the overlap resulted in a root-mean-square deviation (RMSD) of less than 1 Å. This indicated a precise alignment between the two structures, and the generation of a reliable model of a FVII and TFPI-2 K1 complex.

[0486] The side chains on TFPI-2 K1 that were shown by the model to be in close contact with the surface of FVII were identified and mutagenized in silico to correspond to the side chains present in TFPI-1 K1. The results of this analysis revealed an electrostatic complementarity between Factor VII and TFPI-1 K1 in several residues directly adjacent to the active site (i.e. 2^{nd} sphere residues). The residues in FVII involved in the interaction with TFPI-1 K1 based on the above homology analysis are D60, K60a, K60c, T99, R147 and K192 by chymotrypsin numbering, which correspond to D196, K197, K199, T239, R290 and K341, respectively, by mature FVII numbering (FIG. 7). Examination of the modeled interaction indicated that the glycine residue at position 97 by chymotrypsin numbering (G97), which corresponds to G237 by mature FVII numbering, is in close proximity to the contact residues. Modification at this position could result in steric hindrance, which would disrupt interaction of FVII with TFPI.

[0487] B. In Silico Mutation of Factor VII to Provide Increased Resistance to TFPI-1 K1

[0488] Amino acid residues positioned at or near the interface of the FVII/TFPI-1 K1 interaction were identified as described above. Variants of FVII with amino acid changes were designed that either a) replaced complementary electrostatic contacts between FVII and TFPI-1 with repulsive charge-charge contacts and/or b) negate positive electrostatic contacts by replacement of the charged residues on FVII with a neutral residue and/or c) cause steric hindrance by replacement of a residue containing a small side chain with residues containing larger side-chains. Exemplary variants are listed in Table 10.

TABLE 10
Exemplary Factor VII Variants

| Variant | | | Variant |
|---|---|---|---|
| (mature | | | polypeptide |
| FVII | Variant | | SEQ ID |
| numbering) | (Chymotrypsin numbering) | ID | NO |
| D196K | D60K | CB554 | 18 |
| D196R | D60R | CB555 | 19 |
| D196A | D60A | CB556 | 20 |
| D196Y | D60Y | CB601 | 125 |
| D196F | D60F | CB600 | 126 |
| D196W | D60W | CB602 | 127 |
| D196L | D60L | CB603 | 128 |
| D196I | D60I | CB604 | 129 |
| K197Y | K60aY | CB561 | 21 |
| K197A | K60aA | CB559 | 22 |
| K197E | K60aE | CB558 | 23 |
| K197D | K60aD | CB557 | 24 |
| K197L | K60aL | CB560 | 25 |
| K197M | K60aM | CB599 | 26 |
| K197I | K60aI | CB595 | 130 |
| K197V | K60aV | CB596 | 131 |
| K197F | K60aF | CB597 | 132 |
| K197W | K60aW | CB598 | 133 |
| K199A | K60cA | CB564 | 27 |
| K199D | K60cD | CB562 | 28 |
| K199E | K60cE | CB563 | 29 |
| G237W | G97W | CB605 | 134 |
| G237T | G97T | CB606 | 135 |
| G237I | G97I | CB607 | 136 |
| G237V | G97V | CB608 | 137 |
| T239A | T99A | CB565 | 30 |
| R290A | R147A | CB568 | 31 |
| R290E | R147E | CB567 | 32 |
| R290D | R147D | CB566 | 33 |
| K341E | K192E | | 34 |
| K341R | K192R | CB569 | 35 |
| K341Q | K192Q | CB609 | 138 |
| D196R/R290E | D60R/R147E | CB579 | 36 |
| D196K/R290E | D60K/R147E | CB580 | 37 |
| D196R/R290D | D60R/R147D | CB581 | 38 |
| D196R/K197E/ | D60R/K60aE/K60cE | CB586 | 39 |
| K199E | | | |
| D196K/K197E/ | D60K/K60aE/K60cE | CB587 | 40 |
| K199E | | | |
| D196R/K197E/ | D60R/K60aE/K60cE/R147E | CB588 | 41 |
| K199E/R290E | | | |
| D196R/K197M/ | D60R/K60aM/K60cE | CB589 | 42 |
| K199E | | | |
| D196R/K197M/ | D60R/K60aM/K60cE/R147E | CB590 | 43 |
| K199E/R290E | | | |
| D196K/K197L | D60K/K60aL | CB610 | 139 |
| D196F/K197L | D60F/K60aL | CB612 | 140 |
| D196L/K197L | D60L/K60aL | CB611 | 141 |
| D196M/K197L | D60M/K60aL | CB613 | 142 |
| D196W/K197L | D60W/K60aL | CB614 | 143 |
| D196F/K197E | D60F/K60aE | CB615 | 144 |
| D196W/K197E | D60W/K60aE | CB616 | 145 |
| D196V/K197E | D60V/K60aE | CB617 | 146 |

### Example 2

### Cloning and Expression of FVII

### A. Cloning of FVII

[0489] The nucleotides encoding the 466 amino acid human FVII isoform precursor polypeptide (P08709; set forth in SEQ ID NO:1) were cloned into the mammalian expression vector, pCMV Script (Stratagene; SEQ ID NO: 151), which contains a cytomegalovirus (CMV) promoter. Briefly, the CBO-125 (SEQ ID NO:152) and CBO-126 (SEQ ID NO:153) oligonucleotides were used as forward and reverse primers, respectively, to amplify the FVII sequence by PCR using human FVII cDNA (Invitrogen) as the template. The CBO-125 primer contained a BamHI restriction site (in bold), a Kozak sequence (double underlined), followed by 18 nucleotides with homology to the 5′ end of the FVII cDNA sequence (underlined), including the ATG start codon. The CBO-126 primer contained an EcoRI restriction site (in bold), a stop codon (double underlined) and 21 nucleotides with homology to the 3′ end of the FVII cDNA sequence (underlined).

CBO-125 forward primer
5′ gcatcatgacgtgacggatccgccaccatggtctcccaggccctc
3′
CBO-126 reverse primer
5′ gatcgtacgatacgtgaattcctagggaaatggggctcgcaggag
3′

[0490] Standard PCR reaction and thermocycling conditions were used in conjunction with the KoD HiFi PCR kit (EMD Biosciences), as recommended by the manufacturer. The PCR product was digested with BamH I and EcoR I restriction enzymes and ligated into the BamH I and EcoR I restriction sites of pCMV Script vector using standard molecular techniques. The vector was then transformed into Escherichia coli. Selected colonies were grown and bacterial cells harvested for purification of the plasmid using routine molecular biology techniques.

### B. Generation of FVII Variants

[0491] FVII variants were generated using the QuickChange II XL Site-Directed Mutagenesis kit (Stratagene) according to the manufacturers instructions, with specifically designed oligonucleotides which served as primers that incorporated a particular mutation into newly synthesized DNA. The QuikChange method involves linear amplification of template DNA by the PfuUltra high-fidelity DNA polymerase. Complementary primers that include the desired mutation were extended during cycling using purified, double-stranded supercoiled pCMV Script vector that contained the cloned FVII cDNA sequence as a template. Extension of the primers resulted in incorporation of the mutation of interest into the newly synthesized strands, and resulted in a mutated plasmid with staggered nicks. Following amplification, the nucleic acid was treated with Dpn I, which digests the dam-methylated parental strands of the E. coli-derived pCMV Script vector. This resulted in “selection” of the newly-synthesized mutated plasmids, which were not methylated. The vector DNA containing the desired mutation(s) were transformed into XL10-Gold ultracompetent E. coli cells, where bacterial ligase repaired the nicks and allowed normal replication to occur.

[0492] FVII variants with single amino acid substitutions were made by targeting positions D196, K197, K199, G237, T239, R290 and K341, by mature FVII numbering (corresponding to D60, K60a, K60c, G97, T99, R147 and K192 by chymotrypsin numbering). FVII variants with multiple mutations at positions D196, K197 and K199, or mutations at positions D196 and K197, also were generated. The nucleotide sequence of one of the oligonucleotides from each complementary primer pair used to generate the FVII variants is provided in Table 11. The corresponding wild-type sequence also is shown for comparison. The 3 base pair sequence that encodes the substituted amino acid are shown in bold type. For example, to generate a FVII variant containing the substitution D196K (D60K by chymotrypsin numbering; CB554, SEQ ID NO:18), the CBO-157 D60K oligonucleotide, and an oligonucleotide that is complementary to CBO-157 D60K, were used with the QuickChange II XL Site-Directed Mutagenesis kit to replace a 3 base pair “gac” wild-type sequence with a 3 base pair “aag” sequence. The mutated vector encoding a FVII variant polypeptide containing a D196K substitution, was then transformed into XL10-Gold ultracompetent E. coli cells.

TABLE 11

Oligonucleotides used to generate FVII variants

| | | | SEQ |
|---|---|---|---|
| Position | Primer | | ID |
| targeted | name | Primer sequence | NO |
| D196 | D60 | gcggcccactgtttcgacaaaatcaagaactgg | 155 |
| (D60) | wild- | | |
| | type | | |
| | CBO- | gcggcccactgtttcaagaaaatcaagaactgg | 156 |
| | 157 | | |
| | D60K | | |
| | CBO- | gcggcccactgtttcaggaaaatcaagaactgg | 157 |
| | 158 | | |
| | D60R | | |
| | CBO- | gcggcccactgtttcgcgaaaatcaagaactgg | 158 |
| | 159 | | |
| | D60A | | |
| | CBOLH- | gcggcccactgtttctttaaaatcaagaactgg | 186 |
| | 59 D60F | | |
| | CBOLH- | gcggcccactgtttcataaaaatcaagaactgg | 187 |
| | 60 D60Y | | |
| | CBOLH- | gcggcccactgtttctggaaaatcaagaactgg | 188 |
| | 61 | | |
| | D60W | | |
| | CBOLH- | gcggcccactgtttcgagaaaatcaagaactgg | 189 |
| | 62 D60L | | |
| | CBOLH- | gcggcccactgtttcatcaaaatcaagaactgg | 190 |
| | 63 D60I | | |
| K197 | K60a | gcccactgtttcgacaaaatcaagaactggagg | 159 |
| (K60a) | wild- | | |
| | type | | |
| | CBO- | gcccactgtttcgacgacatcaagaactggagg | 160 |
| | 160 | | |
| | K60aD: | | |
| | CBO- | gcccactgtttcgacgagatcaagaactggagg | 161 |
| | 161 | | |
| | K60aE | | |
| | CBO- | gcccactgtttcgacgcgatcaagaactggagg | 162 |
| | 162 | | |
| | K60aA | | |
| | CBO- | gcccactgtttcgacctcatcaagaactggagg | 163 |
| | 163 | | |
| | K60aL | | |
| | CBO- | gcccactgtttcgactatatcaagaactggagg | 164 |
| | 164 | | |
| | K60aY | | |
| | CBOLH- | gcccactgtttcgacatcatcaagaactggagg | 181 |
| | 54 | | |
| | K60aI | | |
| | CBOLH- | gcccactgtttcgacgtcatcaagaactggagg | 182 |
| | 55 | | |
| | K60aV | | |
| | CBOLH- | gcccactgtttcgacttcatcaagaactggagg | 183 |
| | 56 | | |
| | K60aF | | |
| | CBOLH- | gcccactgtttcgactggatcaagaactggagg | 184 |
| | 57 | | |
| | K60aW | | |
| | CBOLH- | gcccactgtttcgacatgatcaagaactggagg | 185 |
| | 58 | | |
| | K60aM | | |
| K199 | K60c | tgtttcgacaaaatcaagaactggaggaacctg | 165 |
| (K60c) | wild- | | |
| | type | | |
| | CBO- | tgtttcgacaaaatcgacaactggaggaacctg | 166 |
| | 165 | | |
| | K60cD | | |
| | CBO- | tgtttcgacaaaatcgagaactggaggaacctg | 167 |
| | 166 | | |
| | K60cE | | |
| | CBO- | tgtttcgacaaaatcgcgaactggaggaacctg | 168 |
| | 167 | | |
| | K60cA | | |
| G237 | G97 | agcacgtacgtcccgggcaccaccaaccacgac | 191 |
| (G97) | wild- | | |
| | type | | |
| | CBOLH- | agcacgtacgtcccgtggaccaccaaccacgac | 192 |
| | 64 | | |
| | G97W | | |
| | CBOLH- | agcacgtacgtcccgacgaccaccaaccacgac | 193 |
| | 65 G97T | | |
| | CBOLH- | agcacgtacgtcccgatcaccaccaaccacgac | 194 |
| | 66 G97I | | |
| | CBOLH- | agcacgtacgtcccggtcaccaccaaccacgac | 195 |
| | 67 G97V | | |
| T239 | T99 | tacgtcccgggcaccaccaaccacgacatcgcg | 169 |
| (T99) | wild- | | |
| | type | | |
| | CBO- | tacgtcccgggcaccgcgaaccacgacatcgcg | 170 |
| | 168 | | |
| | T99A | | |
| R290 | R147 | ggccagctgctggaccgtggcgccacggccctg | 171 |
| (R147) | wild- | | |
| | type | | |
| | CBO- | ggccagctgctggacgacggcgccacggccctg | 172 |
| | 169 | | |
| | R147D | | |
| | CBO- | ggccagctgctggacgagggcgccacggccctg | 173 |
| | 170 | | |
| | R147E | | |
| | CBO- | ggccagctgctggacgcgggcgccacggccctg | 174 |
| | 171 | | |
| | R147A | | |
| K341 | K192 | agcaaggactcctgcaagggggacagtggaggc | 175 |
| (K192) | wild- | | |
| | type | | |
| | CBO- | agcaaggactcctgccgcggggacagtggaggc | 176 |
| | 172 | | |
| | K192R | | |
| | CBOLH- | agcaaggactcctgccagggggacagtggaggc | 196 |
| | 68 | | |
| | K192Q | | |
| D196/ | D60/ | gtggtctccgcggcccactgtttcgacaaaatcaagaactggaggaacctg | 177 |
| K197/ | K60a/ | atcgcggtg | |
| K199 | K60c | | |
| (D60/ | wild- | | |
| K60a/ | type | | |
| K60c) | CBO- | gtggtctccgcggcccactgtttcagggagatcgaaaactggaggaacctg | 178 |
| | 177 | atcgcggtg | |
| | D60R/ | | |
| | K60aE/ | | |
| | K60cE | | |
| | CBO- | gtggtctccgcggcccactgtttcaaggagatcgaaaactggaggaacctg | 179 |
| | 178 | atcgcggtg | |
| | D60K/ | | |
| | K60aE/ | | |
| | K60cE | | |
| | CBO- | gtggtctccgcggcccactgtttcaggatgatcgaaaactggaggaacctg | 180 |
| | 179 | atcgcggtg | |
| | D60R/ | | |
| | K60aM/ | | |
| | K60cE | | |
| D196/ | D60/ | gcggcccactgtttcgacaaaatcaagaactgg | 197 |
| K197 | K60a | | |
| (D60/ | wild- | | |
| K60a) | type | | |
| | CBOLH- | gcggcccactgtttcaagctcatcaagaactgg | 198 |
| | 69 | | |
| | D60K/ | | |
| | K60aL | | |
| | CBOLH- | gcggcccactgtttcctcctcatcaagaactgg | 199 |
| | 70 | | |
| | D60L/ | | |
| | K60aL | | |
| | CBOLH- | gcggcccactgtttctttctcatcaagaactgg | 200 |
| | 71 | | |
| | D60F/ | | |
| | K60aL | | |
| | CBOLH- | gcggcccactgtttcatgctcatcaagaactgg | 201 |
| | 72 | | |
| | D60M/ | | |
| | K60aL | | |
| | CBOLH- | gcggcccactgtttctggctcatcaagaactgg | 202 |
| | 73 | | |
| | D60W/ | | |
| | K60aL | | |
| | CBOLH- | gcggcccactgtttctttgagatcaagaactgg | 203 |
| | 74 | | |
| | D60F/ | | |
| | K60aE | | |
| | CBOLH- | gcggcccactgtttctgggagatcaagaactgg | 204 |
| | 75 | | |
| | D60W/ | | |
| | K60aE | | |
| | CBOLH- | gcggcccactgtttcgtcgagatcaagaactgg | 205 |
| | 76 | | |
| | D60V/ | | |
| | K60aE | | |

### C. Expression of FVII Polypeptides

[0493] For initial expression analysis by ELISA and Western Blot, FVII polypeptides were expressed in BHK-21 cells. For biochemical assays, such as those described below, the FVII polypeptides were expressed in Freestyle™ 293-F cells (Invitrogen).

[0494] The wild-type Factor VII polypeptide (CB553-02, SEQ ID NO:3) and variant FVII polypeptides were initially expressed in the baby hamster kidney cell line BHK-21 (ATCC CRL 1632). BHK-21 cells were cultured in Eagle's minimal essential medium (EMEM, Invitrogen) with 10% fetal calf serum (FCS) in 100 mm culture dishes at 37° C. and 5% CO₂. After growth to approximately 90% confluence, the cells were transfected with 24 μg of FVII plasmid DNA using the Lipofectamine 2000 kit (Invitrogen) as instructed by the manufacturer. The media was replaced 6 hours after transfection with EMEM without serum containing 1 μg/ml vitamin K1 (Sigma) and the cells were incubated for a further 72 hours. Expression of FVII in the cell culture media was assayed by ELISA or Western Blot.

[0495] For subsequent analyses using biochemical assays, the wild-type Factor VII polypeptide (CB553-02, SEQ ID NO:3) and variant FVII polypeptides were expressed in Freestyle™ 293-F cells (Invitrogen). Cells were cultured in Freestyle™ 293 media (Invitrogen) at 37° C. and 8% CO₂ in Erlenmeyer flasks with vented caps. The cells were transfected using the manufacturer's suggested protocol. Briefly, after growth to 1×10⁶ cells/ml, the cells were centrifuged and the media was exchanged. The cells were then transfected with 240 μg of FVII plasmid DNA for every 240 ml of cells using 293fectin (Invitrogen). In addition, 50 μl of a 1 mg/ml stock of Vitamin K₁ (Sigma) in ethanol was added for every 240 ml of cells. The cells were grown for 5 days then the culture supernatant was harvested. Expression of FVII in the cell culture media was assayed by ELISA.

[0496] 1. ELISA

[0497] An immunoassay was used to quantify the amount of human FVII and FVIIa in a sample. Polyclonal antibodies to human FVII were used to capture and detect the protease in the solution. The immunoassay can be used to determine protein concentration of conditioned medium or a purified stock or to determine the concentration of FVII in another sample, for example, a human or mouse plasma sample. The baseline concentration of FVII in human blood is approximately 50 nM and the enzymatically active form, FVIIa, is approximately 1 nM.

[0498] To determine the amount of human FVII or FVIIa protein in samples a sandwich ELISA was performed. Ninety-six well flat bottom Maxisorp immuno plates (Nunc) were coated with 100 μl/well of 5 ng/μl avidin (NeutrAvidin, Pierce Biotech.). The plates were covered and incubated with shaking for 1 hour at room temperature (RT) followed by washing four times in PBS with 0.01% Tween-20 (PBST). The plates were blocked for a minimum of 1 hour at RT with shaking by incubation with 1% bovine serum albumin (BSA) (w/v) in PBS added to each well at 200 μl/well. The blocked plates were then stored at 4° C. until use (up to 2 weeks).

[0499] Before use, the plates were washed four times in PBST to remove the BSA, and 100 μl/well of a 1 ng/μl solution of biotinylated anti-Factor VII antibody (R&D Systems) was added to each well and the plate was incubated at room temperature for 45 minutes with shaking to allow complexation with the coated avidin. Excess unbound antibody was removed by washing the plate with PBST (four times).

[0500] Serial two-fold dilutions of a FVII standard (American Diagnostica; diluted in PBST), ranging from 50 ng/μl to 0.8 ng/μl, were added to the plate at 100 μl/well. A well containing PBST without any FVII also was included as a buffer only control. To assay purified samples (before and after activation, see Example 3) of FVII or FVIIa, the sample was first diluted 1:25 in PBST, and then serial 2-fold dilutions were made so that 25-fold, 50-fold, 100-fold and 200-fold dilutions were tested. The diluted samples were added to the wells in duplicate at 100 μl/well. To assay plasma samples containing FVII or FVIIa, the plasma sample was diluted 1:100 and 1:400 in PBST and added to the wells in duplicate at 100 μl/well. A plasma sample without FVII or FVIIa also was included to determine background levels. The plates were then incubated for 30 minutes at RT with shaking to allow for any FVII or FVIIa in the sample to complex with the anti-FVII antibody.

[0501] After incubation with sample, the plates were washed 4 times with PBST. A secondary antibody, Equine anti-human FVII (American Diagnostica), was diluted 1:5000 in PBST and added to each well at a volume of 100 μl. The plates were incubated for 30 minutes at room temperature with shaking to allow the added antibody to bind to the FVII or FVII complexes on the plate. To remove excess secondary antibody, the plates were washed with PBST (4 times). To detect the bound secondary antibody, 100 μl of goat anti-equine HRP conjugate at a 1:5000 dilution in PBST was added to each well. After incubation for 30 minutes at room temperature with shaking, the plates were washed four times with PBST and 100 μl/well of a solution containing a 1:1 mixture of TMB substrate and hydrogen peroxide solution (Pierce Biotech.) was added. The plates were shaken for approximately 1 minute at room temperature before addition of 100 μl/well of 2M H₂SO₄ to stop the reaction. The optical density at 450 nm was measured using a Molecular Device M5 Plate reader and the background value for the plate (measured with PBST alone) was subtracted from the measured value from each well. A standard curve was generated by plotting the concentration of the FVII standards versus the absorbance. A standard curve range of about 0.2-50 ng/ml was typically generated under the above ELISA conditions. The concentration of each sample was then determined using the standard curve and multiplying by the dilution factor, and an average and standard deviation was reported.

[0502] 2. Western Blot

[0503] Expression of FVII in cell culture media also was assayed by Western blot. Aliquots containing the undiluted sample, or two serial 2-fold dilutions in PBS, of the cell culture medium from FVII-transfected BHK-21 cells were labeled Conc. 1 (undiluted), Conc. 2 (2-fold dilution) and Conc. 3 (4-fold dilution). The samples were loaded on an SDS page gel next to 10, 25, and 50 nanograms of control plasma purified rFVII (American Diagnostica, CB553-01). FVII protein produced by BHK-21 cells was detected by Western blot using a primary polyclonal equine anti-FVII antibody (American Diagnostica; used at the manufacture's suggested concentration) and an HRP-conjugated anti-equine IgG secondary antibody (a 1:2000 dilution of 1 mg/ml solution from Zymed Laboratories). Comparison of expression levels was made with the control plasma purified rFVII. The results show that concentrations ranging from about 20 ng to more than 50 ng of FVII was present in the cell culture aliquots.

### Example 3

### Purification and Activation of FVII Polypeptides

[0504] FVII polypeptides were purified using a Q Sepharose Fast Flow (XK16) column, to which FVII polypeptides with functional Gla domains will adsorb, followed by a calcium elution step. A volume of 240 ml of culture supernatant from the transfected Freestyle™ 293-F cells was diluted 2-fold with a solution containing 20 mM Tris pH 8.0 and 0.01% Tween 20, and then 1.5 ml of 500 mM EDTA pH 8.0 was added to the diluted sample. The samples were filtered before being loaded onto a Q Sepharose Fast Flow (XK16) column which had been pre-equilibrated first with Buffer B (20 mM Tris pH 8.0, 1 M NaCl, 0.01% Tween 20), then Buffer A (20 mM Tris pH 8.0, 0.15 M NaCl, 0.01% Tween 20) at 8 ml/min. After being loaded, the column was washed with Buffer A until the absorbance of the flow-through at 280 nm reached a baseline. Buffer A was replaced with Buffer C (20 mM Tris pH 8.0, 0.15 M NaCl, 0.01% Tween 20, 5 mM CaCl₂) and a pump wash was performed to completely replace the buffer in the lines. Upon completion of the pump wash, Buffer C was applied to the column at 8 ml/min to elute the FVII polypeptides, which were collected in 5 ml fractions for 60 minutes. Following elution, the column was washed with Buffer B while still collecting fractions, until the pink pigment (from the culture media) was washed off the column. The column was then washed with Buffer A to prepare it for purification of FVII from the next sample.

[0505] The eluted fractions were further purified using a Mono Q 5/5 column (containing 1 ml resin), which was pre-equilibrated initially with Buffer B, and then with Buffer A, at 2 ml/min. The 5^{th} to 8^{th} 5 ml fractions collected with buffer C above were pooled and diluted 2-fold with Buffer A, before 1.6 ml of 500 mM EDTA, pH 8.0 was added. Small aliquots (100 μl) were optionally taken at this point for analysis, such as by ELISA. The combined sample was loaded onto the Mono Q column at 2 ml/min, then washed with Buffer A. To elute the bound FVII polypeptides, a gradient from 0% to 30% of Buffer B was run through the column over a period of 20 minutes, at 1 ml/min, and 0.5 ml fractions were collected. The column was then washed with Buffer B followed by Buffer A in preparation for purification of FVII from the next sample.

[0506] Purified FVII polypeptides were activated to FVIIa using biotinylated Factor Xa from the Restriction Protease Factor Xa Cleavage and Removal Kit (Roche). Typically, 7 fractions from the Mono Q purification were pooled in a 15 ml conical tube and 388 μl of 500 mM CaCl₂, 38.9 μl of 10% BSA in distilled water, and 3.2 μg of biotinylated Factor Xa were added. After incubation for 14-16 hrs at 37° C., 250 μl of Immobilized Avidin (Pierce) was added and the sample was mixed at 4° C. for 30 minutes. The resulting solution was then filtered through an Econo-pak column (Bio-Rad), and the filtrate was mixed with another 250 μl of Immobilized Avidin for a further 30 minutes. The solution was filtered again and the filtrate was concentrated to approximately 300-500 μl using an Amicon Ultra-4 10 kDa centrifugal filter (Millipore). The FVIIa concentration was then analyzed by ELISA (as described in Example 2.C.1) and the level of Factor VII activation was monitored by Western blot. Western blotting was performed essentially as described in Example 2.C.2, but instead using rabbit anti-human Factor VIIa antibody (Haematologic Technologies, Inc.) at 1:2000 for 1 hr as the primary antibody, followed by HRP-Goat Anti-Rabbit IgG (H+L) (Invitrogen) at 1:5000 for 30 minutes.

### Example 4

### Michaelis Menten Kinetics Constant Determination of the Amidolytic Activity of FVIIa on a Small Molecule Substrate

[0507] The amidolytic activity of the FVII variants was assessed by measuring the Michaelis Menten kinetics constant of the FVIIa polypeptide on the peptidyl substrate Spectrozyme FVIIa (CH₃SO₂-D-CHA-But-Arg-pNA.AcOH). Lipidated human purified tissue factor (Innovin, Dade Behring, VWR Cat#68100-390) was included in the assay to provide for optimal activity of FVIIa. The TF-FVIIa complex cleaves Spectrozyme FVIIa as a highly specific chromogenic substrate releasing a paranitroanilin-chromophore (pNA), which can be monitored by measuring absorption at 405 nm. Enzyme activity is determined by monitoring the absorbance at 405 nm of the free pNA generated as a function of time.

[0508] The reactions were performed at three different enzyme concentrations. For the reaction, the FVIIa variants were first diluted to 40 nM in 1× direct assay buffer (100 mM Tris pH 8.4, 100 mM NaCl, 5 mM CaCl₂, 0.01% BSA) in a 1.7 mL tube (low adhesion microfuge tubes from ISC Bioexpress). FVIIa was further diluted in the presence of TF (Innovin, Dade Behring) by diluting to 2 nM in a 12-well polypropylene reservoir (Axygen) as follows: 720 μl 5× direct buffer (500 mM Tris pH 8.4, 500 mM NaCl, 25 mM CaCl₂, 0.05% BSA), 180 μl 40 nM FVIIa, and 2700 μl 2×TF (6 nM stock solution reconstituted in 10 mL water). The diluted protease was incubated for 5 minutes at room temperature. The 2 nM stock of FVIIa was further diluted in 2-fold serial dilutions to give a 1 nM and 0.5 nM stock of protease, respectively, also in the presence of TF. The serial dilution reactions were as follows: first, 1800 μl of 2 nM stock of FVIIa/TF from above diluted into 360 μl 5× direct buffer, 900 μl 2×TF, and 540 μl water. This diluted stock was diluted again 1:1 into 1800 μl 1×TF in direct buffer.

[0509] A dilution plate of the substrate Spectrozyme FVIIa (American Diagnostica) was made. The stock solution of Spectrozyme FVIIa was made by reconstitution of the 50 μmoles vial in distilled water to 10 mM and stored at 4° C. Eighty μl (10 mM Spectrozyme FVIIa) and 60 μl+20 μl water (7.5 mM Spectrozyme FVIIa) of the 10 mM Spectrozyme FVIIa were added to wells in two adjacent columns of a 96-well polypropylene assay plate (Costar). The two wells were serially diluted 2-fold down each of the 8 wells of the respective column to make a series of 10× substrate concentrations ranging from 10 mM to 78 μM substrate down the wells of the first column and from 7.5 mM to 58.6 μM substrate down the wells of the second column.

[0510] Five μl of each Spectrozyme FVIIa substrate dilution was added to a 96-well clear half area assay plate (Costar). Forty five μl of each of the three FVIIa/TF dilutions were added to three groups of columns of the substrate series dilutions. During this step, care was taken to avoid introducing bubbles into the wells of the assay. If bubbles were introduced, they were removed by pricking with a clean needle before the beginning of each assy. The plates were mixed by shaking. Prior to initiation of the assay, the pathlength of the assay wells was measured using a Spectramax Gemini M5 plate reader spectrophotometer (Molecular Devices) by taking an endpoint reading and using the Pathcheck feature of the SoftMax Pro software (Molecular Devices). The increase in absorbance at 405 nm was measured every 30 seconds for one hour at 37° C.

[0511] The SoftMax Pro software was used to convert the absorbance rate (milliunits/sec) to concentration of pNA released (μM/sec) by using the pathlength and the extinction coefficient of the pNA leaving group at 405 nm, 9600 M⁻¹cm⁻¹. The conversion equation is as follows: Rate×( 1/60×1000)×(1/9600×Pathlength)×100000. The results for each concentration of protease were graphed using Graph Pad Prism software with the substrate concentration on the X-axis and the determined μM/sec rates on the Y-axis. Using Graph Pad Prism 4 software Km and Ymax were determined by fitting the data to a Michaelis Menten equation as follows:

Y=((k_{cat}Kₘ/1000000)×X×[E])/(1+(X+Kₘ)

[0512] where; X is the substrate concentration (μM)
[0513] Y is the enzyme activity (μM/sec)
[0514] k_{cat}Kₘ is the specificity constant (M⁻¹sec⁻¹)
[0515] Kₘ is the Michaelis constant (μM)
[0516] E is the enzyme concentration (μM)
   Initial values of E=1, Km=X at 0.5×Y max and k_{cat}Kₘ=1000 were set.

[0517] The specific activity (munits/min/nM) of each of the FVIIa variants, wild-type FVIIa (CB553-02) was determined with the above-described assay using 420 μM Spectrozyme FVIIa (Table 17). The activity of the FVIIa variants typically were greater than that of wild-type FVIIa (measured at 2.7 munits/min/nM). The activity of the FVII variants were compared to variants described in the literature (CB591-CB594), and most FVII variants were found to have activity comparable to or greater than the activity of the variants that had been previously described in the literature.

TABLE 12
Specific activity of FVIIa variants

| | | | | Specific |
|---|---|---|---|---|
| | | Mutation | Mutation | Activity |
| | SEQ ID | (mature FVII | (chymotrypsin | (munits/ |
| ID | NO | numbering) | numbering) | min/uM) |
| CB553-02 | 3 | none | none | 2.7 |
| CB554 | 18 | D196K | D60K | 1.7 |
| CB555 | 19 | D196R | D60R | 1.9 |
| CB556 | 20 | D196A | D60A | 3.2 |
| CB557 | 24 | K197D | K60aD | 4.4 |
| CB558 | 23 | K197E | K60aE | 4.4 |
| CB559 | 22 | K197A | K60aA | 4.6 |
| CB560 | 25 | K197L | K60aL | 1.1 |
| CB561 | 21 | K197Y | K60aY | 5.2 |
| CB562 | 28 | K199D | K60cD | 5.5 |
| CB563 | 23 | K199E | K60cE | 5.2 |
| CB564 | 27 | K199A | K60cA | 3.8 |
| CB565 | 30 | T239A | T99A | 2.0 |
| CB566 | 33 | R290D | R147D | 5.5 |
| CB567 | 32 | R290E | R147E | 2.9 |
| CB568 | 31 | R290A | R147A | 3.9 |
| CB569 | 35 | K341R | K192R | 2.9 |
| CB579 | 36 | D196R/R290E | D60R/R147E | 2.9 |
| CB580 | 37 | D196K/R290E | D60K/R147E | 2.7 |
| CB581 | 38 | D196R/R290D | D60R/R147D | 3.1 |
| CB586 | 39 | D196R/K197E/ | D60R/K60aE/ | 5.2 |
| | | K199E | K60cE | |
| CB587 | 40 | D196K/K197E/ | D60K/K60aE/ | 4.8 |
| | | K199E | K60cE | |
| CB588 | 41 | D196R/K197E/ | D60R/K60aE/ | 4.9 |
| | | K199E/R290E | K60cE/R147E | |
| CB589 | 42 | D196R/K197M/ | D60R/K60aM/ | 5.4 |
| | | K199E | K60cE | |
| CB590 | 43 | D196R/K197M/ | D60R/K60aM/ | 6.2 |
| | | K199E/R290E | K60cE/R147E | |
| CB591 | 147 | L305V/S314E/ | L163V/S170bE/ | 3.9 |
| | | L337A/F374Y | K188A/F225Y | |
| CB592 | 148 | M298Q | M156Q | 3.6 |
| CB593 | 149 | V158D/E296V/ | V21D/E154V/ | 3.9 |
| | | M298Q | M156Q | |
| CB594 | 150 | V158D/E296V/ | V21D/E154V/ | 5.0 |
| | | M298Q/K337A | M156Q/K188A | |

### Example 5

### Determination of the Catalytic Activity of FVIIA for its Substrate, Factor X

[0518] The catalytic activity of the FVIIa variants for its substrate, Factor X (FX), was assessed indirectly in a fluorogenic assay by assaying for the activity of FXa, generated upon activation by FVIIa, on the synthetic substrate Spectrafluor FXa. A lipidated form of purified tissue factor (TF) was included in the assay to provide for optimal activity of FVIIa. Enzyme activity of FXa for Spectrafluor FXa (CH3SO2-D-CHA-Gly-Arg-AMC.AcOH) was determined by measuring the increase in absorbance of the generated free fluorophore, AMC (7-amino-4-methylcoumarin), as a function of time.

[0519] Briefly, the FVIIa variants were initially diluted to 0.5 μM in 1× direct assay buffer (100 mM Tris pH 8.4, 100 mM NaCl, 5 mM CaCl2, and 0.01% BSA), then further diluted to 0.1 nM in direct assay buffer. Lipidated full-length TF (Innovin; Dade Behring) was reconstituted in 20 mL water to make a 3 nM solution and diluted to 0.2 nM in 1× direct assay buffer. Four hundred μl of 0.1 nM FVIIa was mixed with 400 μl 0.2 nM TF and incubated at room temperature for 5 minutes. The solution was diluted further by two, 2-fold dilutions into 1× direct assay buffer containing 0.2 nM TF to obtain a total of three FVIIa dilutions of 0.05 nM, 0.025 nM, or 0.0125 nM FVIIa each containing 0.2 nM TF (FVIIa/TF solutions).

[0520] The substrate, Factor X (FX; American Diagnostica; 80 μg) was reconstituted in 135.6 μl distilled water to give a 10 μM stock and stored in aliquots at −80° C. The aliquots were not frozen and thawed more than once. The FX stock was diluted to 800 nM in direct assay buffer, then serially diluted 2-fold to obtain FX solutions ranging from 800 nM to 50 nM.

[0521] Spectrofluor Xa (American Diagnostica; 10 μmoles) was reconstituted in distilled water to 5 mM and stored at 4° C. To a 96-well black half area assay plate (Costar), 5 μl Spectrofluor Xa (American Diagnostica) was added to each well. Then, 25 μl of the FX solution was added to each well. To the last row of wells of the plate, a negative control in which no FX was added also was included in the assay. In duplicate, the three concentrations of the TF/FVIIa solutions were added at 20 μl to wells of respective columns of the plate so that each TF/FVIIa dilution was assayed against each FX dilution, with one set of columns containing no added TF/FVIIa (i.e. FX alone). The plates were mixed by shaking. The fluorescence was measured over time with a spectrafluorometer set to read every 30 seconds for 1 hour at 37° C. (Ex: 380 nm, EM: 450 nm, Cut-off: 435 nm), and the time was reported in time squared units. Following the assay, a standard curve of AMC fluorescence in the same plate reader was generated to covert from fluorescence units to uM substrate released in the assay. A 1 mM AMC in DMSO (Invitrogen) was diluted to 0.02 mM in 1× direct assay buffer. Six, two-fold serial dilutions of the AMC were made ranging from 20 nM to 0.625 nM in 1× direct assay buffer. The fluorescence of the AMC was measured using the same assay conditions as described above and a graph of fluorescence versus concentration of AMC was plotted. The slope of the line was calculated, which served as the conversion factor for RFU to μM in subsequent calculations.

[0522] The kinetics constants for FVIIa activation of FX were calculated by performing linear regression analysis on the inverse of the substrate concentration versus the inverse of the velocity of substrate cleavage (in units of seconds²), with V_{max, FVIIa} calculated as the inverse of the y-intercept, K_{m, FVIIa} as the slope at the y-intercept, and Vₘₐₓ/K_{m, FVIIa} as the inverse of the slope. The k_{cat} value was then derived using the equation;

k_{cat}/K_{m, FVIIa}=Vₘₐₓ/K_{m, FVIIa}×1/(0.5×k2×[FVIIa in μM]×(RFU/μM conversion factor))

where; k2=([S]×k_{cat, FXa})/(K_{m, FXa}+[S]), where k_{cat, FXa} and K_{m, FXa} are the constants for FXa cleavage of Spectrofluor Xa determined experimentally using FXa standards as k_{cat, FXa}=117 sec⁻¹, and K_{m, FXa}=164 μM.

[0523] Using the above assay conditions, the kinetic constant k2 was determined to be 88.1 sec⁻¹.

[0524] The Kₘ and k_{cat} for each of the FVIIa variants was determined to assess the catalytic activity, k_{cat}/Kₘ (M⁻¹sec⁻¹) of each for its substrate, FX (Table 13). The wild-type FVIIa protease (CB553-02) also was assessed and was found to exhibit an activity of 1.8×10⁷ M⁻¹sec⁻¹ Factor VIIa activation of Factor X, as measured by Krishnaswamy, et al. (J. Biol. Chem. (1998) 273:8 4378-86) is 2.9×10⁷ M⁻¹sec⁻¹. Many of the variants displayed comparable activity to that of the unmodified protease. In some instances, FVIIa variants exhibited enhanced catalytic activity compared to the unmodified protease. For example, CB558, CB561 and CB563 exhibited catalytic activities of 5.2×10⁷, 4.3×10⁷ and 5.9×10⁷ M⁻¹sec⁻¹.

TABLE 13
Catalytic activity of FVIIa variants

| | | | Catalytic | | | |
|---|---|---|---|---|---|---|
| | Mutation | Mutation | activity | Log₁₀ | | |
| | (mature FVII | (chymotrypsin | kcat/Km | (kcat/ | Km | kcat |
| ID | numbering) | numbering) | (M−1sec−1) | Km) | (mM) | (sec−1) |
| CB553-02 | none | none | 1.8 × 10⁷ | 7.3 | 0.039 | 0.71 |
| CB554 | D196K | D60K | 3.1 × 10⁷ | 7.5 | 0.038 | 1.2 |
| CB555 | D196R | D60R | 2.6 × 10⁷ | 7.4 | 0.036 | 0.95 |
| CB556 | D196A | D60A | 2.6 × 10⁷ | 7.4 | 0.292 | 7.4 |
| CB557 | K197D | K60aD | 2.5 × 10⁷ | 7.4 | 0.046 | 1.2 |
| CB558 | K197E | K60aE | 5.2 × 10⁷ | 7.7 | 0.020 | 1.1 |
| CB559 | K197A | K60aA | 3.6 × 10⁷ | 7.6 | 0.026 | 0.94 |
| CB560 | K197L | K60aL | 9.3 × 10⁵ | 6.0 | 0.641 | 0.60 |
| CB561 | K197Y | K60aY | 4.3 × 10⁷ | 7.6 | 0.041 | 1.8 |
| CB562 | K199D | K60cD | 1.4 × 10⁷ | 7.2 | 0.070 | 1.0 |
| CB563 | K199E | K60cE | 5.9 × 10⁷ | 7.8 | 0.041 | 2.4 |
| CB564 | K199A | K60cA | 8.4 × 10⁶ | 6.9 | 0.103 | 0.87 |
| CB565 | T239A | T99A | 6.1 × 10⁵ | 5.8 | 0.128 | 0.078 |
| CB566 | R290D | R147D | 1.2 × 10⁶ | 6.1 | 0.045 | 0.053 |
| CB567 | R290E | R147E | 6.8 × 10⁴ | 4.8 | 1.9 | 0.014 |
| CB568 | R290A | R147A | 4.1 × 10⁶ | 6.6 | 0.018 | 0.074 |
| CB569 | K341R | K192R | 2.7 × 10⁶ | 6.4 | 0.092 | 0.25 |
| CB579 | D196R/R290E | D60R/R147E | 1.4 × 10⁶ | 6.1 | 0.032 | 0.044 |
| CB580 | D196K/R290E | D60K/R147E | 1.9 × 10⁶ | 6.3 | 0.025 | 0.047 |
| CB581 | D196R/R290D | D60R/R147D | 3.0 × 10⁶ | 6.5 | 0.28 | 0.085 |
| CB586 | D196R/K197E/ | D60R/K60aE/ | 7.8 × 10⁶ | 6.9 | 0.033 | 0.26 |
| | K199E | K60cE | | | | |
| CB587 | D196K/K197E/ | D60K/K60aE/ | 3.7 × 10⁶ | 6.6 | 0.062 | 0.26 |
| | K199E | K60cE | | | | |
| CB588 | D196R/K197E/ | D60R/K60aE/ | 5.3 × 10⁴ | 4.7 | 0.888 | 0.047 |
| | K199E/R290E | K60cE/R147E | | | | |
| CB589 | D196R/K197M/ | D60R/K60aM/ | 1.1 × 10⁷ | 7.0 | 0.049 | 0.54 |
| | K199E | K60cE | | | | |
| CB590 | D196R/K197M/ | D60R/K60aM/ | 4.6 × 10^{5††} | 5.7 | 0.030 | 0.014 |
| | K199E/R290E | K60cE/R147E | | | | |
| CB591 | L305V/S314E/ | L163V/S170bE/ | 6.3 × 10⁶ | 6.8 | 0.235 | 1.5 |
| | L337A/F374Y | K188A/F225Y | | | | |
| CB592 | M298Q | M156Q | 3.1 × 10⁷ | 7.5 | 0.085 | 2.7 |
| CB593 | V158D/E296V/ | V21D/E154V/ | 4.9 × 10⁷ | 7.7 | 0.063 | 3.1 |
| | M298Q | M156Q | | | | |
| CB594 | V158D/E296V/ | V21D/E154V/ | 1.2 × 10⁸ | 8.1 | 0.035 | 4.1 |
| | M298Q/K337A | M156Q/K188A | | | | |

^{††}Approximate value.

### Example 6

### Determination of the Concentration of Catalytically Viable Protease in a Solution

[0525] The concentration of catalytically viable FVIIa in a stock solution was determined by titrating a complex of Factor VIIa and soluble Tissue Factor (sTF) with an irreversible peptide inhibitor of FVIIa, Phe-Phe-Arg-Chloromethylketone (FFR-CMK). The inhibitor binds to FVIIa but not to FVII. Extended incubation at a high concentration of FVIIa (50 nM) ensures complete titration of the protease. The residual activity of the FVIIa/TF complex after incubation with FFR-CMK was measured to determine the concentration of catalytically viable FVIIa in the original stock solution.

### A. 96-Well Assay Plate Format

[0526] A 96 well clear half area assay plate (Nunc) was pretreated by adding 150 μl/well of 1× plate buffer (100 mM Tris pH 8.4, 100 mM NaCl, 0.01% BSA, 0.01% Tween-20) to each well and incubating the plate at 37° C. for a minimum of 1 hour. The buffer was removed completely by blotting on a paper towel and centrifuging the plate upside down to remove any remaining buffer, and the plate was air-dried for 1 hour and stored covered at room temperature (RT).

[0527] To prepare the FVIIa/sTF/FFR-CMK reaction mixture, a stock of FVIIa (American Diagnostica; diluted to 5 μM in 50% glycerol (v/v) and stored cold in aliquots at −20° C.) or a FVIIa variant was first diluted to 500 nM in 1× direct assay buffer (100 mM Tris pH 8.4, 100 mM NaCl, 5 mM CaCl₂, 0.01% BSA). The FVIIa/sTF mixture was then made by mixing 90 μl distilled water with 36 μl 5× direct assay buffer, 18 μl 500 nM FVIIa, and 18 μl 5 μM sTF (recombinant human Coagulation Factor III/soluble tissue factor; R&D Systems; the stock solution used was 19.6 μM in 50% glycerol and was diluted to 5 μM in 1× direct assay buffer and stored up to two weeks at 4° C.). The components were then allowed to complex for 5 minutes at room temperature.

[0528] A stock solution of 10 mM FFR-CMK (Bachem) in DMSO (stored at −20° C.) was diluted in water to 3.5 μM. Using one row of a polypropylene opaque storage plate (Costar #3363), serial two fold dilutions in water of the FFR-CMK were made across 11 wells of a 96-well opaque plate, with the last well of the row containing only water as a control. This is the 10×FFR-CMK inhibitor series solution. Into each well of a row of the pre-treated 96 well clear half area assay plate, 10.8 μl of the FVIIa/sTF mixture was added, followed by 1.2 μl of the 10×FFR-CMK inhibitor series. The solutions were mixed well and the plate was centrifuged at <3000 rpm for 5 minutes to remove drips in the wells. The plate was covered and incubated for 8 hours at 37° C.

[0529] To assay the residual activity of the FVIIa/TF complex, a mixture of the substrate Spectrozyme FVIIa (American Diagnostica, #217L; reconstituted stock of 50 μmole vial in 5 mL distilled water to 10 mM and stored at 4° C.) and 5× direct buffer (500 mM Tris pH 8.4, 500 mM NaCl, 25 mM CaCl₂ and 0.05% BSA) was first prepared by mixing 360 μl 5× direct assay buffer with 180 μl of a 10 mM solution of Spectrozyme FVIIa and 1080 μl of water. To each well of the assay plate, 108 μl of the prepared substrate solution was added. The wells were mixed and the plate was incubated at 37° C. The increase in absorbance at 405 nm was measured every 30 seconds for one hour at 37° C. on a Spectramax Gemini M5 plate reader from Molecular Devices.

[0530] Using SoftMax Pro software (Molecular Devices), the absorbance rates were measured and the fractional activity of proteases incubated with an inhibitor was determined by dividing the measured rate by the rate of the uninhibited protease. The fractional activity was graphed against the concentration of FFR-CMK, and points that were >90% or <10% of the uninhibited activity were discarded. A line was then drawn through the remaining points to determine the x-intercept, which represents the concentration of active protease in the solution. The values from multiple assays was measured and averaged and the standard deviation was determined.

### B. 384-Well Assay Format

[0531] In order to increase the accuracy and throughput of the titration, the previous assay was modified for to a 384 well plate based format. Incubation was carried out for seven hours at a high protease concentration (250 nM) with a series of FFR-CMK concentrations spanning the range from 400 nM to 53 nM. The residual activity was measured by adding the FVIIa substrate (Mesyl-dFPR-ACC) and measuring the change in fluorescence signal over time.

[0532] Briefly, a 384 well black assay plate (Nunc) was pretreated as in Example 6. Then, a FVIIa/sTF solution was prepared by mixing 32.5 μl 1 μM FVIIa+19.5 μl 5 μM sTF+6.5 μl 5×AST buffer (100 mM Na Hepes, pH 7.5, 750 mM NaCl, 25 mM CaCl₂, 0.5% BSA, 0.5% PEG 8000) and 6.5 μl dH₂0. This reaction was incubated at room temperature for 5 minutes. One half of a 384 well plate accommodates 5 proteases measured in triplicate, and a single assay control sample. During the FVIIa/sTF incubation, the 20 mM FFR-CMK was diluted to 8 μM in 1 mM HCl, followed by 9 serial 1.25 fold dilutions across a 96 well plate. The remaining two wells of the row were left with 1 mM HCl alone. This row was then diluted 10 fold into 1×AST buffer and mixed to generate a series of FFR-CMK concentrations from 800 nM to 107 nM. To each row of the 384 well plate, 4 μl of the FFR-CMK dilution series was pipetted. Then, 4 μl of the FVIIa/sTF solution was mixed with the inhibitor series across eleven columns of the plate. The final column was filled with 4 μl 1×AST buffer to act as the plate blank. The plate was centrifuged, sealed, and incubated at room temperature for seven hours with shaking. The assay was initiated with 72 μl of 110 μM Mesyl-dFPR-ACC diluted in 1×AST buffer. The increase in fluorescence was monitored at Ex:380 nm and Em:460 nm for 20 minutes with readings every 45 seconds at 37° C. The data was analyzed in the same manner as Example 6, with the following refinements. First, the residual activity was limited to those activities between 20% and 80% of the protease alone activity. Second, the y-intercept of the linear fit was constrained to fall between 0.9 and 1.1. Third, the x-intercept was constrained to those between 125 nM and 375 nM. The x-intercept for the three replicates of each protease were averaged and the value and standard deviation reported.

### Example 7

### Determination of the IC₅₀ for TFPI Inhibition of FVIIa/TF

[0533] The potency of the interaction between TFPI and the FVIIa/TF complex was assessed by measuring the level of inhibition of various concentrations of TFPI on the catalytic activity of a FVIIa/TF towards a substrate, Spectrazyme VIIa. The concentration of TFPI that was required for 50% inhibition (IC₅₀) was calculated for each FVII variant, and a FVIIa standard.

[0534] A 96 well clear half area assay plate (Nunc) was pretreated by adding 150 μl/well of 1× plate buffer (100 mM Tris pH 8.4, 100 mM NaCl, 0.01% BSA, 0.01% Tween-20) to each well and incubating the plate at 37° C. for a minimum of 1 hour. The buffer was removed completely by shaking and blotting the plate and centrifuging the plate upside down to remove the remaining buffer. The plate was air-dried for 1 hour, and stored at room temperature (RT).

[0535] In a 1.7 ml microfuge tube (low adhesion microfuge tube from ISC Bioexpress), a mixture of FVIIa/TF was prepared in a total volume of 450 μl by mixing 9 μl of 250 nM FVIIa (American Diagnostica, CB553-02 or a respective variant to be tested) was mixed with 337.5 μl of 2×TF (Innovin; Dade Behring; lyophilized product resuspended in 10 mL distilled water to generate 2×TF, which approximately equals 7 nM of lipidated TF), 90 μl 5× assay buffer (500 mM Tris pH 8.4, 500 mM NaCl, 25 mM CaCl₂, 0.05% BSA) and 13.5 μl of water, resulting in a solution containing 5 nM FVIIa and 5.2 nM TF. The mixture was incubated at room temperature for 5 minutes to allow the components to complex. To each well of 2 columns in the pretreated 96 well clear half area assay plate, 25 μl of the respective FVIIa/sTF mixture was added and the plate was covered to prevent evaporation.

[0536] Human Recombinant TFPI (R&D Systems) was initially dissolved in 33 μl 50% glycerol (v/v) to make a 10 μM stock for storage at −20° C. The TFPI stock was further diluted to 1.5 μM in a final 1× direct buffer (100 mM Tris pH 8.4, 100 mM NaCl, 5 mM CaCl₂, 0.01% BSA) in a polypropylene storage plate as follows: for each protease tested, 87.5 μl of a 1.5 μM solution of TFPI was made by mixing 13.1 μl 10 μM TFPI with 17.5 μl 5× assay buffer and 56.9 μl distilled water. Serial 3-fold dilutions of the TFPI solution were made in 1× assay buffer by mixing 27.5 μl TFPI into 55 μl 1× assay buffer, such that solutions containing 750 nM, 250 nM, 83.3 nM, 27.8 nM, 9.26 nM, 3.1 nM, and 1.03 nM TFPI were generated. The final well of the series contained only 1× direct buffer as a control.

[0537] Twenty-five μl of each dilution of TFPI was added to 2 wells (i.e. in duplicate) of 2 columns of the 96 well clear half area assay plate containing the FVIIa/TF mixture, such that the protease mixture was assayed in duplicate with each TFPI dilution. A solution of 1× assay buffer without TFPI also was added to 2 wells containing the FVIIa/TF mixture as a negative control. The plate was agitated briefly and then centrifuged at 3000 rpm for 5 minutes before incubation at 37° C. for 1.5 hours.

[0538] A stock solution of Spectrazyme VIIa (American Diagnostica) was prepared by reconstituting 50 μmoles in 5 ml distilled water to 10 mM and storing at 4° C. until use. Immediately prior to use, the solution was diluted to 600 μM in distilled water. Following incubation of the assay plate from above, 10 μl of the diluted Spectrazyme VIIa was added to each well of the assay plate. The reactions were mixed and the plate was incubated at 37° C. The increase in absorbance at 405 nm was measured every 30 seconds for one hour at 37° C., and the absorbance rate were calculated using SoftMax Pro software (Molecular Devices).

[0539] To determine the degree of inhibition by TFPI, the absorbance rates of protease reactions containing TFPI were first divided by the absorbance rate of reactions containing no TFPI (the control sample) to obtain the fractional activity, and the log₁₀ of each TFPI concentration was determined. Using GraphPad Prism Software, the log₁₀ [TFPI] was plotted against the fractional activity for each protease, and dose response curve was generated with a curve fit that assumed the top and bottom of the activity data are fixed at 1 and 0, respectively. The software was used to determine TFPI inhibition as both the log IC₅₀ (pIC₅₀) value, and the absolute IC₅₀ (TFPI inhibition in nM) for each protease, and its average and standard deviated was determined.

[0540] The level of inhibition of TFPI of each of the FVIIa variants in complex with sTF was determined and expressed as IC₅₀ or pIC₅₀ (Table 14). The degree to which TFPI inhibited the activity of unmodified FVIIa (CB553-02) in complex with sTF also was determined, and the IC₅₀ was found to be 88 nM. Nine of the FVIIa variants that were generated displayed a decreased potency of their interaction with TFPI, as reflected in increased IC₅₀ values.

TABLE 14
Inhibition of FVIIa variants by TFPI

| | Mutation | Mutation | | |
|---|---|---|---|---|
| | (mature FVII | (chymotrypsin | | |
| ID | numbering) | numbering) | IC₅₀ (nM) | pIC₅₀ |
| CB553-02 | none | none | 88 | 7.1 |
| CB554 | D196K | D60K | 45 | 7.4 |
| CB555 | D196R | D60R | 37 | 7.4 |
| CB556 | D196A | D60A | 5 | 8.3 |
| CB557 | K197D | K60aD | 220 | 6.7 |
| CB558 | K197E | K60aE | 310 | 6.5 |
| CB559 | K197A | K60aA | 53 | 7.3 |
| CB560 | K197L | K60aL | 1100 | 5.9 |
| CB561 | K197Y | K60aY | 110 | 7.0 |
| CB562 | K199D | K60cD | 63 | 7.2 |
| CB563 | K199E | K60cE | 33 | 7.5 |
| CB564 | K199A | K60cA | 68 | 7.2 |
| CB565 | T239A | T99A | 320 | 6.5 |
| CB566 | R290D | R147D | 240 | 6.6 |
| CB567 | R290E | R147E | 440 | 6.4 |
| CB568 | R290A | R147A | 200 | 6.7 |
| CB569 | K341R | K192R | 300 | 6.5 |
| CB579 | D196R/R290E | D60R/R147E | 28 | 7.6 |
| CB580 | D196K/R290E | D60K/R147E | 52 | 7.3 |
| CB581 | D196R/R290D | D60R/R147D | 32 | 7.5 |
| CB586 | D196R/K197E/ | D60R/K60aE/ | 13 | 7.9 |
| | K199E | K60cE | | |
| CB587 | D196K/K197E/ | D60K/K60aE/ | 20 | 7.7 |
| | K199E | K60cE | | |
| CB588 | D196R/K197E/ | D60R/K60aE/ | 28 | 7.6 |
| | K199E/R290E | K60cE/R147E | | |
| CB589 | D196R/K197M/ | D60R/K60aM/ | 44 | 7.4 |
| | K199E | K60cE | | |
| CB590 | D196R/K197M/ | D60R/K60aM/ | 66 | 7.2 |
| | K199E/R290E | K60cE/R147E | | |
| CB591 | L305V/S314E/ | L163V/S170bE/ | 43 | 7.4 |
| | L337A/F374Y | K188A/F225Y | | |
| CB592 | M298Q | M156Q | 35 | 7.5 |
| CB593 | V158D/E296V/ | V21D/E154V/ | 41 | 7.4 |
| | M298Q | M156Q | | |
| CB594 | V158D/E296V/ | V21D/E154V/ | 22 | 7.7 |
| | M298Q/K337A | M156Q/K188A | | |

### Example 8

### In Vivo Assessment of Wild-Type FVIIa Procoagulant Activity

[0541] A mouse model of hemophilia A was established to assess the procoagulant activity of FVIIa polypeptides. Hemophilia A was induced in CD-1 mice by administration of anti-FVIII antibodies, followed by surgical removal of the tips of the tails to initiate bleeding. The mice were then treated with FVIIa polypeptide and the time taken to stop bleeding, and the amount of blood lost during this time, was measured to determine the procoagulant activity of the FVIIa polypeptides.

[0542] Male CD-1 mice were anesthetized by intraperitoneal administration of both thiobarbital sodium at 100 mg/kg, and ketamine at 100 mg/kg. Lidocaine was administered by subcutaneous injection into the ventral neck to reduce sensitivity. The trachea and carotid artery were cannulated through a small skin incision in the neck to facilitate unrestricted breathing and the administration of anti-Factor VIII antibody, recombinant human Factor VIIa (rhFVIIa) and/or modified FVII polypeptides.

[0543] Cannulated mice were administered 3.76 mg sheep-anti-human-FVIII antibody (Affinity Biologicals, lot IG129R4, 612 mouse BU/ml) in 40 μL. This dose was determined by conducting an initial dose response experiment with the antibody, using 0.376, 0.94, 1.88 and 3.76 mg of anti-human-FVIII, and assessing blood loss and bleeding time. After 20 minutes, the tails of the mice were placed in 15 mL tubes containing 39° C. phosphate buffered saline (PBS) for a period of 10 minutes. At 30 minutes, the tails were briefly removed from the PBS solution and the last 5 mm of the tails were severed to initiate bleeding. The time at which bleeding began was noted. The tails were then returned to the tube containing 39° C. PBS and allowed to bleed for 5 minutes (pre-bleed) to ensure that the mice had responded to the anti-FVIII antibody. Following the pre-bleed, the mice were administered FVIIa polypeptides or the vehicle in which the FVIIa proteins were prepared and delivered. FVIIa polypeptides were diluted in either PBS or a buffer composed of 52 mM sodium chloride, 10.2 mM calcium chloride dehydrate, 9.84 mM glycylglycine, 0.01% polysorbate 80 and 165 mM mannitol. The FVIIa preparations were administered at either 1, 3 or 10 mg/kg, in a volume equivalent to 3 mL/kg, via the carotid cannulae and the tails were placed in fresh tubes containing 39° C. PBS. The bleeding was monitored for a period of 20 minutes and the times at which bleeding stopped were noted. The total bleeding time was calculated as the sum of the duration of bleeding during the pre-bleed, and the duration of bleeding following administration of FVIIa polypeptides, or PBS or buffer.

[0544] To determine the amount of blood lost during the bleeding episodes, the contents of the 15 mL tubes were assayed for hemoglobin content. Triton X-100 was diluted 1 in 4 in sterile water and 100 μL was added to 1 mL of the samples to cause hemolysis. The absorbance of the samples was then measured at a wavelength of 546 nm. To calculate the amount of blood lost, the absorbance was read against a standard curve generated by measuring the absorbance at 546 nm of known volumes of murine blood, diluted in PBS and hemolysed as above with Triton X 100.

[0545] An experiment was conducted comparing rhFVIIa (CB533) generated as described above with the commercially available recombinant human FVIIa (NovoSeven®, Novo Nordisk) and blood loss was assessed following administration of a 3 mg/kg dose of each protein. The blood loss in the vehicle group (buffer, n=15) was 671.9±57.89 μl over the 20 minute period. This was reduced by the rhFVIIa produced by Catalyst Biosciences to 264.1±56.59 μl and by NovoSeven® to 273.7±53.93 μl (n=14). This experiment demonstrated equivalency between the two proteins.

### Example 9

### Pharmacokinetic Analysis of FVIIa Polypeptides

[0546] Pharmacokinetic properties of FVIIa polypeptides were assessed by measuring the amount of human Factor VIIa in mouse plasma. Two assays were used to quantify FVIIa in plasma. An ELISA was used to quantify total FVIIa protein in mouse plasma and a FVIIa-dependant clotting assay (FVII:C) was used to quantify coagulant activity of the FVIIa polypeptides in plasma.

### A. Administration of FVIIa Polypeptides to Mice

[0547] Modified FVIIa polypeptides and the unmodified recombinant human FVIIa (rhFVIIa) protein (NovoSeven®, Novo Nordisk) were evaluated in pharmacokinetic studies. For each study, 18 male CD-1 mice were injected with an intravenous bolus dose (0.1-3.0 mg/kg, depending on the study) of rFVIIa. At 5, 15, 30, 60, 120, and 240 minutes post-injection, three mice from each injection protocol were euthanized using CO₂ asphyxiation and approximately 1.0 mL of blood was drawn into a 1.0 mL syringe via a percutaneous cardiac puncture. Each syringe was pre-loaded with sufficient sodium citrate to achieve a final concentration of 3.2% in 1 mL of blood. The blood samples were then centrifuged at 9000 rpm for 8 min at 4° C. The plasma was removed to labeled individual 1.5 ml tubes (Eppendorf), snap frozen in liquid nitrogen and stored at −80° C. Additionally, one mouse per experiment was injected with vehicle alone (sham) and plasma from this mouse was used for background FVIIa activity determination.

### B. ELISA Assay

[0548] A commercially available kit, IMUBIND® Factor VII ELISA (American Diagnostica) was used to detect FVII protein in serum by ELISA. This kit employs a plate pre-coated with an anti-FVII/FVIIa antibody to capture the protein, and a biotinylated anti-FVII antibody for detection through a streptavidin labeled horseradish peroxidase. The kit was used according to the manufacturers' direction with the following exceptions: first, the standard curve has been narrowed to ensure a linear range over the entire concentration range and spans the concentrations of 0.88 ng/ml to 10 ng/ml; second, the purified FVIIa variant itself was used for the standard curve rather than the FVII standard provided with the kit because of differences in the antibody affinity. Experiments indicated that the complex of FVIIa with anti-thrombin III (ATIII), a potential plasma inhibitor of FVIIa, is detected at 75% of the level of the free protease, ensuring that the assay can detect the total FVIIa in the plasma sample in both the active and inactive forms.

[0549] Briefly, the plasma samples were thawed at room temperature and diluted 10 fold in sample buffer (PBS+0.1% Triton X-100+1.0% BSA) then diluted serially 5.5 fold for four dilutions. The four diluted samples were diluted 2 fold onto the ELISA plate for final sample dilutions of 20, 110, 605 and 3327.5 fold. These four dilutions of mouse plasma covered a range of protease concentrations from 33,000 ng/ml to 20 ng/ml. Each sample was measured on two separate assays plates, and those measurements within the range of the standard curve were used to calculate the concentration of FVIIa variant in the plasma sample

### C. Clotting Assay

[0550] A commercially available kit (STACLOT FVIIa-rTF, Diagnostica Stago, Parsippany, N.J.) was used as the clooting assay. To determine the coagulant activity of the active FVIIa polypeptides, plasma samples were assayed using a FVIIa-dependant clotting assay (FVII:C). The assay was performed using reagents and instructions provided in a commercial kit and clotting time measured using an electromechanical clot detection instrument (STArt4, Diagnostica Stago, Parsippany, N.J.). The kit was used according to the manufacturers' direction with the following exceptions: first, the purified FVIIa variant itself was used for the standard curve rather than the rhFVIIa standard provided with the kit; second, the following bulk commercial reagents were used for routine pharmacokinetic screening studies and gave comparable results to the kit reagents: soluble tissue factor (CalBioChem, La Jolla, Calif.) and synthetic phospholipid blend (Avanti Polar Lipids, Alabaster, Ala.), TBSA buffer (Tris-NaCl, pH 7.5 with 1% BSA; DiaPharma, West Chester, Ohio), and 25 μM calcium chloride solution (Diagnostica Stago, Parsippany, N.J.).

[0551] The clotting assay was performed as follows. Frozen plasma samples were thawed at room temperature for approximately 45 min and then diluted 1:5000 in buffer. Fifty μl of the diluted plasma is combined with 50 μL Factor VII-deficient human plasma and 50 μL of relipidated tissue factor and pre incubated for 180 seconds. Following preincubation, 50 μL of calcium chloride solution (25 μM) was added to initiate clotting. Clotting time was determined using electromechanical clot detection. Each plasma sample was assayed in duplicate. The system was calibrated by constructing a standard curve using the clotting time of serial dilutions of buffer containing a known amount of the specific FVIIa variant being assayed. FVIIa concentrations in mouse plasma samples were calculated from the linear portion of the log FVIIa versus Log clotting time standard curve. The ability of plasma samples to induce clotting in Factor VII-deficient plasma was reported as ng FVIIa/mL of mouse plasma following background subtraction of endogenous wild type FVIIa in plasma from sham treated mice.

[0552] The half-life of each FVII protein was routinely determined by making a conventional fit of the natural log of the activity to a straight line, and measuring the time taken for the activity of FVIIa proteins to be reduced by half. For FVII proteins with multi exponential decay, half-life was determined from the terminal portion of the log plasma VS time profile. Additional pharmacokinetic parameters were calculated using commercially available software (WinNonLin v5.1, Pharsight Corporation, Mountain View, Calif.).

### D. Pharmacokinetic Properties of CB728, CB735 and CB945

[0553] Using the above protocol, the pharmacokinetic properties of wild-type FVIIa and two FVIIa variants: CB728, CB735 and CB945 were assessed. The results are set forth in Table 15. CB735 and CB945 exhibited improved pharmacokinetic parameters compared to wild-type FVIIa.

TABLE 15
Mouse Pharmacokinetic Parameters of FVIIa Variants

| | Mutation | | | | | | |
|---|---|---|---|---|---|---|---|
| | (mature | IV | | Half- | | | |
| | FVII | Dose | Plasma AUC_{0-inf} | Life | Cl | Vd | |
| CB# | numbering) | (mg/kg) | (μg · min/mL)/Dose | (min) | (mL/min/kg) | (mL/kg) | N |
| CB553 | WT | 0.1 | 606 | 35.1 | 2.02 | 98.8 | 5 |
| CB553 | WT | 1.0 | 798 | 50.2 | 1.55 | 118 | 2 |
| CB728 | Gla Swap | 0.1 | 207 | 19.9 | 4.85 | 140 | 2 |
| | FIX | | | | | | |
| CB735 | K341D | 0.1 | 2817 | 106 | 0.14 | 22.0 | 1 |
| CB945 | M156Q/K192D | 0.1 | 2430 | 78.1 | 0.41 | 46.3 | 1 |

### E. Pharmacokinetic Properties of CB558

[0554] The half-life of a modified FVIIa polypeptide that exhibited increased resistance to TFPI (CB-558; containing a K197E mutation) was measured and compared with that of an unmodified recombinant human FVIIa (rhFVIIa) protein (NovoSeven®, Novo Nordisk) in a pharmacokinetic study similar to that described above, with some modifications. Fifteen male CD-1 mice were injected with a 0.5 mg/kg intravenous bolus dose of CB-558, and 15 mice were injected with a 0.5 mg/kg intravenous bolus dose of rhFVIIa. At 5, 15, 30, 60 and 120 min post-injection, three mice from each injection protocol were euthanized using CO₂ asphyxiation and approximately 1.0 mL of blood was drawn into a 1.0 mL syringe via a percutaneous cardiac puncture. Each syringe was pre-loaded with sufficient sodium citrate to achieve a final concentration of 3.2% in 1 mL of blood. The blood samples were then centrifuged at 9000 rpm for 8 min at 4° C. The plasma was removed to labeled individual 1.5 ml tubes (Eppendorf), snap frozen in liquid nitrogen and stored at −80° C.

[0555] To determine the coagulant activity and the half-life of the active FVIIa polypeptides, the plasma samples were assessed at Machaon Diagnostics, Inc. (Oakland, Calif.) using a FVIIa-dependant clotting assay (FVII:C) and an automated hemostasis instrument (AMAX 190plus, Trinity Biotech). Briefly, the frozen plasma samples were thawed in a 37° C. water-bath for 5 minutes and then diluted 1:40 in Veronal Buffer. Six μl of the diluted plasma was added to 54 μl Veronal buffer in a cuvette and mixed with a metal bead. An equal amount (60 μl) of Factor VII-deficient human plasma (Precision Biologic) was then added to the cuvette, which was incubated at 37° C. for 60 seconds with constant mixing.

[0556] To initiate the start of timing of the reaction, 120 μL of thromboplastin (rabbit brain source, Thromboplastin-DS; Pacific Hemostasis) was added to the cuvette and constant mixing was maintained therein. The clotting reaction was monitored photo-optically at 405 nm to detect formation of fibrin. The system was calibrated by analyzing the clotting time of serial dilutions of reference plasma with published FVII levels (Precision Biologic), and then analyzing the clotting time of normal control plasma (Precision Biologic) and abnormal control plasma (Precision Biologic).

[0557] The ability of plasma samples to induce clotting in Factor VII-deficient plasma was reported as a percentage of the clotting time observed in normal human plasma. The coagulant activity of plasma from both FVIIa (NovoSeven®)-treated and CB-558-treated mice decreased over time. The half-life of each FVII protein was determined by making a conventional fit of the natural log of the activity to a straight line, and measuring the time taken for the activity of FVIIa proteins to be reduced by half. The half-life of CB-558 was observed to be approximately twice that of FVIIa (NovoSeven®); 156 minutes compared with 67 minutes.

### Example 10

### Generation of Additional FVII Variants

[0558] A series of additional FVII mutants were generated to alter one or more properties and/or activities of FVII. In addition to modifications to increase TFPI resistance, modifications were designed to increase resistance to AT-III, increase catalytic activity, increase half-life, and/or increase affinity and/or binding to phospholipids, such as those on activated platelets. The modifications include amino acid replacement, insertion and deletion. FVII variants containing two or more modifications also were generated. Table 23 sets forth the FVII variants that were generated and expressed in Freestyle™ 293-F cells. Amino acid replacements were incorporated into FVII polypeptides using the methods described in Example 2.B, above, with an appropriate oligonucleotide.

[0559] Table 15 below sets forth the additional FVII variants that were generated. Gla swap FVII variants were generated in which amino acid residues A1 to Y44 (by mature FVII numbering) at the N-terminus of the wild-type FVII protein were replaced with amino acid residues corresponding to the Gla domain of FIX, FX, Protein C, Protein S or thrombin. The “Gla Swap FIX” FVII variant (i.e. a FVII polypeptide in which the endogenous Gla domain has been replaced with the Gla domain from FIX) contains amino acid residues A2 to Y45 of SEQ ID NO: 110 at the N-terminus; the “Gla Swap FX” FVII variant contains amino acid residues A1 to Y44 of SEQ ID NO: 111 at the N-terminus; the “Gla Swap Protein C” FVII variant contains amino acid residues A1 to H44 of SEQ ID NO: 113 at the N-terminus; the “Gla Swap Protein S” FVII variant contains amino acid residues A1 to Y44 of SEQ ID NO:114 at the N-terminus; and the “Gla Swap thrombin” FVII variant contains amino acid residues A1 to Y44 of SEQ ID NO: 115 at the N-terminus.

TABLE 15
Exemplary Factor VII Variants

| | | | Variant |
|---|---|---|---|
| | | | polypeptide |
| | Variant | Variant | SEQ ID |
| ID | (mature FVII numbering) | (Chymotrypsin numbering) | NO |
| CB697 | R290N | R147N | 206 |
| CB698 | R290Q | R147Q | 207 |
| CB699 | R290K | R147K | 208 |
| CB700 | R290M | R147M | 209 |
| CB701 | R290V | R147V | 210 |
| CB733 | K341N | K192N | 211 |
| CB734 | K341M | K192M | 212 |
| CB735 | K341D | K192D | 213 |
| CB853 | G237T238insA | G97T98insA | 214 |
| CB854 | G237T238insS | G97T98insS | 215 |
| CB855 | G237T238insV | G97T98insV | 216 |
| CB856 | G237T238insAS | G97T98insAS | 217 |
| CB857 | G237T238insSA | G97T98insSA | 218 |
| CB858 | D196K197insK | D60K60ainsK | 219 |
| CB859 | D196K197insR | D60K60ainsR | 220 |
| CB860 | D196K197insY | D60K60ainsY | 221 |
| CB861 | D196K197insW | D60K60ainsW | 222 |
| CB862 | D196K197insA | D60K60ainsA | 223 |
| CB863 | D196K197insM | D60K60ainsM | 224 |
| CB864 | K197I198insE | K60aI60binsE | 225 |
| CB865 | K197I198insY | K60aI60binsY | 226 |
| CB866 | K197I198insA | K60aI60binsA | 227 |
| CB867 | K197I198insS | K60aI60binsS | 228 |
| CB637 | K197E/K341Q | K60aE/K192Q | 229 |
| CB638 | K197L/K341Q | K60aL/K192Q | 230 |
| CB670 | G237V/K341Q | G97V/K192Q | 231 |
| CB688 | K197E/K199E | K60aE/K60cE | 232 |
| CB689 | K197E/G237V | K60aE/G97V | 233 |
| CB691 | K197E/K199E/K341Q | K60aE/K60cE/K192Q | 250 |
| CB694 | K199E/K341Q | K60cE/K192Q | 234 |
| CB671 | K197E/G237V/K341Q | K60aE/G97V/K192Q | 235 |
| CB669 | V158D/G237V/E296V/M298Q | V21D/G97V/E154V/M156Q | 241 |
| CB591 | L305V/S314E/ | L163V/S170bE/K188A/F225Y | 147 |
| | L337A/F374Y | | |
| CB592 | M298Q | M156Q | 148 |
| CB593 | V158D/E296V/ | V21D/E154V/M156Q | 149 |
| | M298Q | | |
| CB594 | V158D/E296V/ | V21D/E154V/M156Q/K188A | 150 |
| | M298Q/K337A | | |
| CB690 | K197E/G237V/M298Q | K60aE/G97V/M156Q | 242 |
| CB692 | K197E/G237V/M298Q/K341Q | K60aE/G97V/M156Q/K192Q | 243 |
| CB693 | K197E/K199E/G237V/M298Q/ | K60aE/K60cE/G97V/M156Q/ | 244 |
| | K341Q | K192Q | |
| CB695 | G237V/M298Q | G97V/M156Q | 245 |
| CB696 | G237V/M298Q/K341Q | G97V/M156Q/K192Q | 246 |
| CB902 | K197E/M298Q | K60aE/M156Q | 248 |
| CB945 | M298Q/K341D | M156Q/K192D | 249 |
| CB728 | Gla swap FIX | Gla swap FIX | 236 |
| CB729 | Gla swap FX | Gla swap FX | 237 |
| CB730 | Gla Swap Prot C | Gla Swap Prot C | 238 |
| CB731 | Gla Swap Prot S | Gla Swap Prot S | 239 |
| CB732 | Gla swap Thrombin | Gla swap Thrombin | 240 |
| CB850 | M298Q/Gla Swap FIX | M156Q/Gla Swap FIX | 247 |

### Example 11

### Analysis of the Catalytic Activity of FVIIa Variants for the Substrate, Factor X

[0560] The catalytic activity of the FVIIa variants for the substrate, Factor X (FX), was assessed indirectly in two types of chromogenic assays by assaying for the activity of FXa, generated upon activation by FVIIa, on the synthetic substrate Spectrafluor FXa. The two assays were performed either in the presence or the absence of lipidated tissue factor, to assess both TF-dependent and TF-independent activity. The FVII variants were expressed, purified and activated to FVIIa as described above in Examples 2 and 3. Although most FVII variants were expressed only in Freestyle™ 293-F cells, some also were expressed in BHK-21 cells.

[0561] Lipidated Tissue Factor Indirect Assay

[0562] The catalytic activity of the FVIIa variants in the presence of tissue factor was assessed using the assay described in Example 5, above, with minor modifications. One such modification was the use of a Factor X substrate protease that had been treated with ERG-CMK and FFR-CMK to reduce the background activity (Molecular Innovations). Two types of data analysis were performed using two separate assays; a linear range analysis assay and a hyperbolic range analysis assay. The linear range analysis assay used a range of Factor X concentrations between 0 and 150 nM to ensure accurate measurement of the kinetic constants in the linear range of the dose curve. In contrast, the hyperbolic range analysis assay used a range of Factor X concentrations between 0 and 1.44 μM to ensure accurate measurement of the kinetic constants with a saturating (hyperbolic) dose curve.

[0563] The lipidated tissue factor indirect assay with linear range data analysis was performed essentially as described in Example 5, above, with the following modifications. The FVIIa variant/TF solutions were prepared as 0.1 nM FVIIa/0.4 nM TF solutions and incubated for 30 minutes before being diluted two-fold in 0.4 nM TF down to a solution containing 1.5625 μM FVIIa/0.4 nM TF. Twenty-five μL of the FVIIa/TF solution was mixed with 25 μL of a substrate solution that contained 1.0 mM Spectrofluor FXa (American Diagnostica) and one of 300 nM, 200 mM, 133.3 nM, 88.9 nM, 59.3, 39.5 nM, 36.3 nM or 0 nM of Factor X (Molecular Innovations). Thus, the final concentrations for the assay were 0.8 pM FVIIa, 0.2 nM TF, 0.5 mM Spectrofluor FXa and 150 nM, 100 mM, 66.7 nM, 44.4 nM, 29.6 nM, 19.8 nM, 13.2 nM or 0 nM of Factor X (Molecular Innovations) in 50 μL/well. The AMC standard curve, which served as the conversion factor for RFU to μM in subsequent calculations, was expanded to include a dose range that covered from 0 μM to 100 μM AMC.

[0564] The lipidated tissue factor indirect assay with hyperbolic range data analysis was performed essentially as described in Example 5, above, with the following modifications. The FVIIa variant/TF solutions were prepared as 0.1 nM FVIIa/0.4 nM TF solutions and incubated for 30 minutes before being diluted two-fold in 0.4 nM TF down to 1.5625 pM (or 0.78 pM for proteases expected to have high activity) FVIIa/0.4 nM TF. Twenty-five μL of the FVIIa/TF solution was mixed with 25 μL of a substrate solution that contained 1.0 mM Spectrofluor FXa (American Diagnostica) and one of 1440 nM, 720 mM, 360 nM, 180 nM, 90 nM, 45 nM, 22.5 nM or 0 nM of Factor X (Molecular Innovations). Thus, the final concentrations for the assay were 0.8 (or 0.39) pM FVIIa, 0.2 nM TF, 0.5 mM Spectrofluor FXa and 7 nM, 720 mM, 360 nM, 180 nM, 90 nM, 45 nM, 22.5 nM, 11.25 nM or 0 nM of Factor X (Molecular Innovations) in 50 μL/well. The k_{cat} and Kₘ parameters are calculated using the Michaelis Menton hyperbolic equation of the form (Vₘₐₓ/(1+(Kₘ/x))). The AMC standard curve, which served as the conversion factor for RFU to μM in subsequent calculations, was expanded to include a dose range that covered from 0 μM to 100 μM AMC.

[0565] To determine the kinetic rate constants for the FVIIa or FVIIa variant activation of FX, raw data collected with the SoftMax Pro application (Molecular Devices) were exported as .XML files. Further data linear and non-linear analyses were performed with XLfit4, a software package for automated curve fitting and statistical analysis within the Microsoft Excel spreadsheet environment (IDBS Software).

[0566] For data collected using the linear range assay, the k_{cat}/Kₘ (M⁻¹sec⁻¹) kinetic constants are calculated directly from the slope of linear regression analyses of the FX concentration versus the velocity of the fluorogenic substrate cleavage (in μM/sec²) where k_{cat}/Kₘ=slope/[FVIIa]×0.5×k₂. The correction factor k₂ was determined to be 45 using the method described in Example 5 and kinetic constants for FXa cleavage of Spectrofluor FXa of k_{cat,FXa}=56 sec⁻¹ and K_{m, FXa}=126 nM, determined experimentally with activated FX (FXa) that was previously active site titrated with AT-III/heparin. Excluding data points that resulted in R2 values less than 0.98 ensured the linearity of the data sets used in the fitting routine.

[0567] Analyses of data collected using the hyperbolic range assay were calculated from non-linear regression analyses of the FX concentration versus the velocity of the fluorogenic substrate cleavage (in μM/sec²). The individual k_{cat} and Kₘ parameters are calculated as fit parameters using the Michaelis Menton hyperbolic equation of the form (Vₘₐₓ/(1+(Kₘ/x))) where k_{cat}=Vₘₐₓ/[FVIIa]×0.5×k₂. The kinetic constant, k_{cat}/K_{M} was calculated from the individual k_{cat} and Kₘ fitted parameters.

[0568] Tissue Factor-Independent Indirect Assay

[0569] The catalytic activity of the FVIIa variants in the presence of tissue factor was assessed in an indirect assay similar to that described above except that tissue factor was not included in the assay. Thus, the assay to assess TF-independent activity was performed essentially as described above, with the following modifications. The FVIIa variant solutions were diluted to 50 nM. Twenty-five μL of each FVIIa solution was mixed with 25 μL of a substrate solution that contained 1.0 mM Spectrofluor FXa (American Diagnostica) and one of 1050 nM, 700 mM, 466.7 nM, 311.1 nM, 207.4 nM, 138.3 nM, 92.2 nM or 0 nM of Factor X (Molecular Innovations). Thus, the final concentrations for the assay were 25 nM FVIIa, 0.5 mM Spectrofluor FXa and 525 mM, 350 nM, 233.3 nM, 155.6 nM, 103.7 nM, 69.1 nM, 46.1 nM or 0 nM of Factor X (Molecular Innovations) in 50 μL/well. Data analyses were performed as described for the linear range assay, above with no modifications.

[0570] Tables 16-18 provide the results of the assays that were performed to measure the catalytic activity of the FVIIa variants. Tables 16 and 17 provide the catalytic activity as measured in a TF-dependent Indirect Assay using FVIIa polypeptides expressed from 293-F cells and BHK-21 cells, respectively, and Table 18 provides the catalytic activity as measured in a TF-independent Indirect Assay using FVIIa polypeptides expressed from 293-F cells and/or BHK-21 cells. The results are presented as the kinetic constant for catalytic activity, k_{cat}/Kₘ (M⁻¹sec⁻¹), and also expressed as a percentage of the activity of the wild-type FVIIa, wherein the activity is catalytic activity, k_{cat}/Kₘ (M⁻¹sec⁻¹) of each FVIIa variant for its substrate, FX. The use of the linear or hyperbolic range data analysis also is indicated for the values presented in the tables. Not all FVIIa variants were assayed in each assay. Some of the FVII variants assayed in Example 5, above, displayed slightly reduced or increased catalytic activity for FX in this set of assays compared to the assay described in Example 5. The difference in activities to those seen in Example 5 are likely are due to varied background activity of residual FXa in the FX substrate obtained from American Diagnostica. Several FVIIa variants exhibited increased catalytic activity compared to the wild-type FVIIa molecule. For example, CB760, which contains the Q366V mutation, has a catalytic activity of between 1.5 and 5 times that of wild-type FVIIa.

TABLE 16
Catalytic activity of FVIIa variants: TF-Dependent Indirect
Assay with FVIIa polypeptides from 293-F cells

| | Mutation | | | k_{cat}/K_{M} | |
|---|---|---|---|---|---|
| | (mature FVII | Mutation | k_{cat}/K_{M} | (% | Assay |
| ID | numbering) | (Chymotrypsin numbering) | (M⁻¹s⁻¹) | WT) | Format |
| CB553 | WT | WT | 3.42 × 10⁷ | 100 | linear |
| CB554 | D196K | D60K | 1.10 × 10⁷ | 23 | hyperbolic |
| CB555 | D196R | D60R | 2.25 × 10⁷ | 46 | hyperbolic |
| CB556 | D196A | D60A | 2.58 × 10⁷ | 53 | hyperbolic |
| CB557 | K197D | K60aD | 3.05 × 10⁷ | 63 | hyperbolic |
| CB558 | K197A | K60aE | 1.54 × 10⁷ | 32 | hyperbolic |
| CB559 | K197E | K60aA | 3.67 × 10⁷ | 75 | hyperbolic |
| CB560 | K197L | K60aL | 1.51 × 10⁷ | 31 | hyperbolic |
| CB561 | K197Y | K60aY | 5.16 × 10⁷ | 106 | hyperbolic |
| CB562 | K197D | K60cD | 4.62 × 10⁷ | 95 | hyperbolic |
| CB563 | K197E | K60cE | 3.63 × 10⁷ | 74 | hyperbolic |
| CB564 | K197A | K60cA | 5.56 × 10⁷ | 114 | hyperbolic |
| CB565 | T239A | T99A | 1.66 × 10⁷ | 34 | hyperbolic |
| CB566 | R290D | R147D | 5.80 × 10⁶ | 12 | hyperbolic |
| CB567 | R290E | R147E | 6.18 × 10⁶ | 13 | hyperbolic |
| CB568 | R290A | R147A | 8.25 × 10⁶ | 17 | hyperbolic |
| CB569 | K341R | K192R | 3.95 × 10⁷ | 81 | hyperbolic |
| CB579 | D196R/R290E | D60R/R147E | 2.31 × 10⁶ | 5 | hyperbolic |
| CB580 | D196K/R290E | D60K/R147E | 7.81 × 10⁴ | 0 | hyperbolic |
| CB581 | D196R/R290D | D60R/R147D | 2.91 × 10⁶ | 6 | hyperbolic |
| CB586 | D196R/K197E/K199E | K60cE/K60aE/D60R | 7.97 × 10⁶ | 16 | hyperbolic |
| CB587 | D196K/K197E/K199E | K60cE/K60aE/D60K | 7.22 × 10⁶ | 15 | hyperbolic |
| CB588 | D196R/K197E/ | K60cE/K60aE/D60R/R147E | 3.66 × 10⁵ | 1 | hyperbolic |
| | K199E/R290E | | | | |
| CB589 | D196R/K197M/K199E | K60cE/K60aM/D60R | 1.81 × 10⁷ | 37 | hyperbolic |
| CB590 | D196R/K197M/ | K60cE/K60aM/D60R/R147E | 2.88 × 10⁵ | 1 | hyperbolic |
| | K199E/R290E | | | | |
| CB591 | L305V/S314E/L337A/F374Y | L163V/S170bE/K188A/F225Y | 6.73 × 10⁷ | 138 | hyperbolic |
| CB592 | M298Q | M156Q | 1.40 × 10⁸ | 409 | linear |
| CB593 | V158D/E296V/M298Q | V21D/E154V/M156Q | 1.67 × 10⁸ | 487 | linear |
| CB594 | V158D/E296V/M298Q/ | V21D/E154V/M156Q/K188A | 5.18 × 10⁸ | 1061 | hyperbolic |
| | K337A | | | | |
| CB595 | K197I | K60aI | 5.31 × 10⁷ | 109 | hyperbolic |
| CB596 | K197V | K60aV | 5.15 × 10⁷ | 106 | hyperbolic |
| CB597 | K197F | K60aF | 7.20 × 10⁷ | 148 | hyperbolic |
| CB598 | K197W | K60aW | 6.25 × 10⁷ | 128 | hyperbolic |
| CB599 | K197M | K60aM | 7.83 × 10⁷ | 160 | hyperbolic |
| CB600 | D196F | D60F | 2.35 × 10⁷ | 48 | hyperbolic |
| CB601 | D196Y | D60Y | 6.93 × 10⁷ | 142 | hyperbolic |
| CB602 | D196W | D60W | 3.40 × 10⁷ | 70 | hyperbolic |
| CB603 | D196L | D60L | 8.57 × 10⁷ | 176 | hyperbolic |
| CB604 | D196I | D60I | 7.99 × 10⁷ | 164 | hyperbolic |
| CB605 | G237W | G97W | 8.63 × 10⁷ | 177 | hyperbolic |
| CB606 | G237T | G97T | 3.13 × 10⁷ | 64 | hyperbolic |
| CB608 | G237V | G97V | 8.91 × 10⁷ | 183 | hyperbolic |
| CB609 | K341Q | K192Q | 1.56 × 10⁷ | 32 | hyperbolic |
| CB611 | K197L/D196L | K60aL/D60L | 4.39 × 10⁷ | 90 | hyperbolic |
| CB612 | K197L/D196F | K60aL/D60F | 3.79 × 10⁶ | 8 | hyperbolic |
| CB613 | K197L/D196M | K60aL/D60M | 1.86 × 10⁷ | 38 | hyperbolic |
| CB614 | K197L/D196W | K60aL/D60W | 9.81 × 10⁶ | 20 | hyperbolic |
| CB615 | K197E/D196F | K60aE/D60F | 1.87 × 10⁷ | 38 | hyperbolic |
| CB616 | K197E/D196W | K60aE/D60W | 3.50 × 10⁷ | 72 | hyperbolic |
| CB617 | K197E/D196V | K60aE/D60V | 6.50 × 10⁶ | 13 | hyperbolic |
| CB637 | K197E/K341Q | K60aE/K192Q | 7.22 × 10⁶ | 15 | hyperbolic |
| CB638 | K197L/K341Q | K60aL/K192Q | 6.66 × 10⁶ | 14 | hyperbolic |
| CB669 | V158D/G237V/E296V/ | V21D/E154V/M156Q/G97V | 6.70 × 10⁷ | 196 | linear |
| | M298Q | | | | |
| CB670 | G237V/K341Q | K192Q/G97V | 1.57 × 10⁷ | 32 | hyperbolic |
| CB671 | K197V/G237V/K341Q | K60aE/K192Q/G97V | 7.05 × 10⁶ | 21 | linear |
| CB688 | K197E/K199E | K60aE/K60cE | 9.85 × 10⁶ | 20 | hyperbolic |
| CB689 | K197E/G237V | K60aE/G97V | 1.32 × 10⁷ | 27 | hyperbolic |
| CB690 | K197E/G237V/M298Q | K60aE/G97V/M156Q | 3.19 × 10⁷ | 93 | linear |
| CB691 | K197E/K199E/K341Q | K60aE/K60cE/K192Q | 3.89 × 10⁶ | 8 | hyperbolic |
| CB692 | K197E/G237V/M298Q/ | K60aE/G97V/M156Q/K192Q | 6.42 × 10⁶ | 13 | hyperbolic |
| | K341Q | | | | |
| CB693 | K197E/K199E/G237V/ | K60aE/K60cE/G97V/M156Q/ | 3.49 × 10⁶ | 7 | hyperbolic |
| | M298Q/K341Q | K192Q | | | |
| CB694 | K199E/K341Q | K60cE/K192Q | 7.64 × 10⁶ | 16 | hyperbolic |
| CB695 | G237V/M298Q | G97V/M156Q | 4.30 × 10⁷ | 125 | linear |
| CB696 | G237V/M298Q/K341Q | G97V/M156Q/K192Q | 4.25 × 10⁷ | 124 | linear |
| CB697 | R290N | R147N | 1.36 × 10⁷ | 28 | hyperbolic |
| CB698 | R290Q | R147Q | 8.59 × 10⁶ | 18 | hyperbolic |
| CB699 | R290K | R147K | 1.52 × 10⁷ | 31 | hyperbolic |
| CB700 | R290M | R147M | 1.23 × 10⁷ | 25 | hyperbolic |
| CB701 | R290V | R147V | 2.66 × 10⁶ | 5 | hyperbolic |
| CB728 | Gla swap FIX | Gla swap FIX | 3.83 × 10⁷ | 112 | linear |
| CB729 | Gla swap FX | Gla swap FX | 9.46 × 10⁶ | 19 | hyperbolic |
| CB730 | Gla Swap Protein C | Gla Swap Prot C | 3.19 × 10⁶ | 7 | hyperbolic |
| CB732 | Gla swap Thrombin | Gla swap Thrombin | 1.04 × 10⁷ | 21 | hyperbolic |
| CB850 | M298Q/Gla Swap FIX | M156Q/Gla swap FIX | 7.51 × 10⁷ | 219 | linear |
| CB733 | K341N | K192N | 2.35 × 10⁷ | 69 | linear |
| CB734 | K341M | K192M | 8.35 × 10⁶ | 17 | hyperbolic |
| CB735 | K341D | K192D | 1.44 × 10⁷ | 42 | linear |
| CB854 | G237T238insS | G97T98insS | 1.32 × 10⁷ | 38 | linear |
| CB855 | G237T238insV | G97T98insV | 1.23 × 10⁷ | 36 | linear |
| CB856 | G237T238insAS | G97T98insAS | 1.12 × 10⁷ | 33 | linear |
| CB858 | D196K197insK | D60K60ainsK | 3.03 × 10⁷ | 88 | linear |
| CB859 | D196K197insR | D60K60ainsR | 4.81 × 10⁷ | 140 | linear |
| CB860 | D196K197insY | D60K60ainsY | 3.93 × 10⁷ | 115 | linear |
| CB866 | K197I198insA | K60aI60binsA | 4.11 × 10⁷ | 120 | linear |
| CB902 | K197E/M298Q | K60aE/M156Q | 9.68 × 10⁷ | 283 | linear |

TABLE 17
Catalytic activity of FVIIa variants: TF-Dependent Indirect Assay
with FVIIa polypeptides from BHK-21 cells

| | Mutation | | | k_{cat}/K_{M} | |
|---|---|---|---|---|---|
| | (mature FVII | Mutation | k_{cat}/K_{M} | (% | Assay |
| ID | numbering) | (Chymotrypsin numbering) | (M⁻¹s⁻¹) | WT) | Format |
| CB553 | WT | WT | 5.42 × 10⁷ | 100 | linear |
| CB592 | M298Q | M156Q | 9.34 × 10⁷ | 172 | linear |
| CB593 | V158D/E296V/M298Q | V21D/E154V/M156Q | 2.04 × 10⁸ | 376 | linear |
| CB728 | Gla swap FIX | Gla swap FIX | 8.70 × 10⁷ | 160 | linear |
| CB735 | K341D | K192D | 1.02 × 10⁷ | 19 | linear |
| CB853 | G237T238insA | G97T98insA | 1.60 × 10⁷ | 30 | linear |
| CB854 | G237T238insS | G97T98insS | 1.67 × 10⁷ | 31 | linear |
| CB855 | G237T238insV | G97T98insV | 1.66 × 10⁷ | 31 | linear |
| CB856 | G237T238insAS | G97T98insAS | 1.68 × 10⁷ | 31 | linear |
| CB857 | G237T238insSA | G97T98insSA | 1.83 × 10⁷ | 34 | linear |
| CB858 | D196K197insK | D60K60ainsK | 3.55 × 10⁷ | 65 | linear |
| CB859 | D196K197insR | D60K60ainsR | 7.24 × 10⁷ | 133 | linear |
| CB862 | D196K197insA | D60K60ainsA | 4.31 × 10⁷ | 79 | linear |
| CB863 | D196K197insM | D60K60ainsM | 3.61 × 10⁷ | 67 | linear |
| CB864 | K197I198insE | K60aI60binsE | 2.80 × 10⁷ | 52 | linear |
| CB865 | K197I198insY | K60aI60binsY | 4.27 × 10⁷ | 79 | linear |
| CB867 | K197I198insS | K60aI60binsS | 6.35 × 10⁷ | 117 | linear |
| CB945 | M298Q/K341D | M156Q/K192D | 1.04 × 10⁷ | 19 | |

TABLE 18
Catalytic activity of FVIIa variants: TF-Independent Indirect Assay

| | Mutation | Mutation | 293-F Cells | | BHK-21 Cells | |
|---|---|---|---|---|---|---|
| | (mature FVII | (Chymotrypsin | k_{cat}/K_{M} | k_{cat}/K_{M} | k_{cat}/K_{M} | k_{cat}/K_{M} |
| ID | numbering) | numbering) | (M⁻¹s⁻¹) | (% WT) | (M⁻¹s⁻¹) | (% WT) |
| CB553 | WT | WT | 22.60 | 100 | 1.58 | 100 |
| CB592 | M298Q | M156Q | 485.5 | 2029 | 310.25 | 1969 |
| CB593 | V158D/E296V/M298Q | V21D/E154V/M156Q | 5493.68 | 24313 | 3217.77 | 20423 |
| CB669 | V158D/G237V/E296V/ | V21D/E154V/M156Q/ | 2145.3 | 9494 | | |
| | M298Q | G97V | | | | |
| CB692 | K197E/G237V/M298Q/ | K60aE/G97V/M156Q/ | 1 | 4 | | |
| | K341Q | K192Q | | | | |
| CB695 | G237V/M298Q | G97V/M156Q | 24.35 | 108 | | |
| CB728 | Gla swap FIX | Gla swap FIX | 110 | 486 | 24 | 154 |
| CB850 | M298Q/Gla Swap | M156Q/Gla swap FIX | 15.4 | 68 | | |
| | FIX | | | | | |
| CB902 | K197E/M298Q | K60aE/M156Q | 8.55 | 38 | | |

### Example 12

### Determination of the Inhibition of FVIIa/TF or FVIIa by AT-III/heparin

[0571] The potency of the interaction between the AT-III/heparin complex and FVIIa in the presence or absence of soluble tissue factor (sTF), i.e. TF-dependent or TF-independent, was assessed by measuring the level of inhibition of various concentrations of AT-III on the catalytic activity of FVIIa/sTF towards a substrate, Mesyl-FPR-ACC. The K_{0.5} value was determined for each FVIIa variant tested, which corresponds to the molar concentration of AT-III that was required for 50% inhibition (IC₅₀) of FVIIa variant in a 30 minute assay at room temperature (˜25°).

[0572] Two separate assays were prepared, one with TF and one without TF. A 2 μM solution of AT-III/heparin (final 5 mM heparin) was prepared by mixing 26.4 μL of 151.7 μM AT-III (plasma purified human AT-III; Molecular Innovations) with 50 μL of 0.2 mM LMW heparin (CalBiochem), 400 μL of 5× assay buffer (100 mM Hepes, 750 mM NaCl, 25 mM CaCl₂, 0.05% BSA, 0.5% PEG 8000, pH 7.4) and 1.523 mL of reagent grade water. This solution was for use as the highest concentration in the TF-dependent assay. A solution containing 4 μM AT-III/heparin (final 5 mM heparin) was prepared for use in the TF-independent assay by mixing 52.8 μL of 151.7 μM AT-III (Molecular Innovations) with 50 μL of 0.2 mM LMW heparin (CalBiochem), 400 μL of 5× assay buffer and 1.497 mL of reagent grade water. The AT-III/heparin solutions were incubated for 5-10 minutes at room temperature and then diluted two-fold down in a 96 deep-well polypropylene plate with a final volume of 1 mL containing 5 μM heparin, resulting in dilutions of 2000, 1000, 500, 250, 125, 62.5, 31.25 and 0 nM, or 4000, 2000, 1000, 500, 250, 125, 62.5, and 0 nM. The FVIIa variants and wild-type FVIIa were diluted to 250 nM in 1× assay buffer (20 mM Hepes, 150 mM NaCl, 5 mM CaCl₂, 0.01% BSA, 0.1% PEG 8000, pH 7.4). For the TF-dependent assay, 5 nM FVIIa/50 nM sTF complexes were formed by mixing 20 μL of FVIIa with 10 μL of 5 μM sTF (R&D Systems Human Coagulation Factor III: #2339-PA), 200 μL 5× assay buffer and 770 μL reagent grade water and incubating the solutions for 10-15 minutes at room temperature. For the TF-independent assay, 100 μL of FVIIa was mixed with 200 μL 5× assay buffer and 700 μL reagent grade water to produce 25 nM solutions of FVIIa. To start the assay, 25 μL of the FVIIa/TF or FVIIa alone solutions were separately mixed with 25 μL of each dilution of AT-III/heparin in wells of a 96-well black half area assay plate (Nunc). The final assay conditions for the TF-dependent assay were 2.5 nM FVIIa/25 nM sTF and AT-III/heparin concentrations ranging from 1000 nM to 0 nM. For the TF-independent assay, FVIIa concentrations were 12.5 nM FVIIa and AT-III/heparin concentrations ranged from 2000 nM to 0 nM. The plates were incubated for 30 minutes with shaking at room temperature (˜25° C.).

[0573] A stock solution of FVIIa substrate (Mesyl-FPR-ACC) was prepared by dissolving the substrate in DMSO to 20 mM then preparing a working solution of 0.5 mM in 1× assay buffer. Following incubation of the assay plate from above, 50 μl of the FVIIa substrate was added to each well of the assay plate. The reactions were mixed and the residual activity of FVIIa was assessed by following the initial rates of substrate cleavage for 15 minutes in a fluorescence reader set to 30° C.

[0574] To determine the degree of inhibition by AT-III/heparin for FVIIa or FVIIa variants, raw data collected with the SoftMax Pro application (Molecular Devices) were exported as .XML files. Further non-linear data analyses were performed with XLfit4, a software package for automated curve fitting and statistical analysis within the Microsoft Excel spreadsheet environment (IDBS Software). The spreadsheet template was used to calculate the AT-III dilution series, ratio of AT-III to FVIIa, and the Vi/Vo ratios for each FVIIa replicate at each experimental AT-III concentration. Non-linear regression analyses of residual FVIIa activity (expressed as Vi/Vo) versus AT-III concentration was processed using XLfit4 and a hyperbolic inhibition equation of the form ((C+(Amp*(1−(X/(K_{0.5}+X))))); where C=the offset (fixed at 0 to permit extrapolation of data sets that do not reach 100% inhibition during the course of the assay), Amp=the amplitude of the fit and K_{0.5}, which corresponds to the concentration of AT-III required for half-maximal inhibition under the assay conditions. For several FVIIa variants, AT-III inhibited less than 20-25% of the of the total protease activity at the highest tested concentration of AT-III, representing an upper limit of detection for the assay. Variants with less than 20-25% maximal inhibition were therefore assigned a lower limit K_{0.5} value (5 μM for TF-dependent and 10 μM for TF-independent) and in most cases are expected to have AT-III resistances greater than the reported value.

[0575] Tables 19 and 20 provide the results of the assays that were performed using FVIIa variants expressed in Freestyle™ 293-F cells and/or BHK-21 cells, in the presence and absence of TF, respectively. The results are presented both as the fitted K_{0.5} parameter and as a representation of the extent of AT-III resistance for each variant compared to the wild-type FVIIa expressed as a ratio of their fitted K_{0.5} values (K_{0.5} variant/K_{0.5} wild-type). Several FVIIa variants exhibited increased resistance to AT-III compared to wild-type FVIIa.

TABLE 19
Inhibition of FVIIa variants by AT-III/heparin in the presence of TF

| | | | TF-Dependent ATIII Resistance Assay | | | |
|---|---|---|---|---|---|---|
| | | Mutation | 293-F Cells | | BHK-21 Cells | |
| | Mutation (mature | (Chymotrypsin | K_{0.5} | | K_{0.5} | |
| FVIIa | FVII numbering) | Numbering) | (nM) | K_{0.5mut}/K_{0.5wt} | (nM) | K_{0.5mut}/K_{0.5wt} |
| CB553 | WT | WT | 72.3 | 1.0 | 56.0 | 1.0 |
| CB593 | V158D/E296V/M298Q | V21D/E154V/M156Q | 75.1 | 1.0 | 79.0 | 1.4 |
| CB609 | K341Q | K192Q | 104.5 | 1.4 | | |
| CB733 | K341N | K192N | 41.2 | 0.6 | | |
| CB734 | K341M | K192M | 78.2 | 1.1 | | |
| CB735 | K341D | K192D | 1985.8 | 27.5 | | |
| CB853 | G237T238insA | G97T98insA | | | 169.5 | 3.0 |
| CB854 | G237T238insS | G97T98insS | | | 163.9 | 2.9 |
| CB855 | G237T238insV | G97T98insV | 189.6 | 2.6 | | |
| CB856 | G237T238insAS | G97T98insAS | | | 391.4 | 7.0 |
| CB857 | G237T238insSA | G97T98insSA | | | 266.9 | 4.8 |
| CB858 | D196K197insK | D60K60ainsK | | | 64.9 | 1.2 |
| CB859 | D196K197insR | D60K60ainsR | | | 34.0 | 0.6 |
| CB860 | D196K197insY | D60K60ainsY | 29.5 | 0.4 | | |
| CB862 | D196K197insA | D60K60ainsA | | | 60.7 | 1.1 |
| CB863 | D196K197insM | D60K60ainsM | | | 55.9 | 1.0 |
| CB864 | K197I198insE | K60aI60binsE | | | 183.7 | 3.3 |
| CB865 | K197I198insY | K60aI60binsY | | | 66.5 | 1.2 |
| CB867 | K197I198insS | K60aI60binsS | | | 82.7 | 1.5 |
| CB728 | Gla swap FIX | Gla swap FIX | 68.8 | 1.0 | | |

TABLE 20
Inhibition of FVIIa variants by AT-III/heparin in the absence of TF

| | | | TF-Independent ATIII Resistance Assay | | | |
|---|---|---|---|---|---|---|
| | | Mutation | 293-F Cells | | BHK-21 Cells | |
| | Mutation (mature | (Chymotrypsin | K_{0.5} | | K_{0.5} | |
| FVIIa | FVII numbering) | Numbering) | (nM) | K_{0.5mut}/K_{0.5wt} | (nM) | K_{0.5mut}/K_{0.5wt} |
| CB553 | WT | WT | 2265.8 | 1.0 | 2222.7 | 1.0 |
| CB593 | V158D/E296V/M298Q | V21D/E154V/M156Q | 389.7 | 0.2 | 415.6 | 0.2 |
| CB609 | K341Q | K192Q | 4622.6 | 2.0 | | |
| CB733 | K341N | K192N | 1554.4 | 0.7 | | |
| CB734 | K341M | K192M | 5523.9 | 2.4 | | |
| CB735 | K341D | K192D | 10000.0 | >4.4 | | |
| CB853 | G237T238insA | G97T98insA | | | 10000.0 | >4.5 |
| CB854 | G237T238insS | G97T98insS | | | 10000.0 | >4.5 |
| CB855 | G237T238insV | G97T98insV | 10000.0 | >4.4 | | |
| CB856 | G237T238insAS | G97T98insAS | | | 10000.0 | >4.5 |
| CB857 | G237T238insSA | G97T98insSA | | | 10000.0 | >4.5 |
| CB858 | D196K197insK | D60K60ainsK | | | 9329.6 | 4.2 |
| CB859 | D196K197insR | D60K60ainsR | | | 4322.6 | 1.9 |
| CB860 | D196K197insY | D60K60ainsY | 2053.3 | 0.9 | | |
| CB862 | D196K197insA | D60K60ainsA | | | 7414.3 | 3.3 |
| CB863 | D196K197insM | D60K60ainsM | | | 7299.4 | 3.3 |
| CB864 | K197I198insE | K60aI60binsE | | | 10000.0 | >4.5 |
| CB865 | K197I198insY | K60aI60binsY | | | 8800.4 | 4.0 |
| CB867 | K197I198insS | K60aI60binsS | | | 10000.0 | >4.5 |
| CB728 | Gla swap FIX | Gla swap FIX | 1005.2 | 0.4 | | |

### Example 13

### Determination of the Resistance to TFPI of FVIIa Variants

[0576] The resistance of various FVIIa variants to TFPI was assessed using the assay described in Example 7, above. Table 21 provides the results of the assays. The results are expressed as the fold resistance of each FVIIa variant to TFPI compared to wild-type FVIIa.

TABLE 21
Inhibition of FVIIa variants by TFPI

| | Mutation (mature FVII | Mutation (chymotrypsin | TFPI fold |
|---|---|---|---|
| ID | numbering) | numbering) | resistance |
| CB553 | wt | wt | 1.0 |
| CB554 | D196K | D60K | 0.6 |
| CB555 | D196R | D60R | 0.5 |
| CB556 | D196A | D60A | <0.3 |
| CB557 | K197D | K60aD | 3.0 |
| CB558 | K197A | K60aE | 1.3 |
| CB559 | K197E | K60aA | 0.7 |
| CB560 | K197L | K60aL | 16.0 |
| CB561 | K197Y | K60aY | 1.5 |
| CB562 | K197D | K60cD | 0.9 |
| CB563 | K197E | K60cE | 1.3 |
| CB564 | K197A | K60cA | 0.9 |
| CB565 | T239A | T99A | 4.5 |
| CB566 | R290D | R147D | 3.3 |
| CB567 | R290E | R147E | 6.1 |
| CB568 | R290A | R147A | 2.8 |
| CB569 | K341R | K192R | 4.1 |
| CB579 | D196R/R290E | D60R/R147E | 0.4 |
| CB580 | D196K/R290E | D60K/R147E | 0.7 |
| CB581 | D196R/R290D | D60R/R147D | 0.4 |
| CB586 | D196R/K197E/K199E | D60R/K60aE/K60cE | <0.3 |
| CB587 | D196K/K197E/K199E | D60K/K60aE/K60cE | 0.3 |
| CB588 | D196R/K197E/K199E/R290E | D60R/K60aE/K60cE/R147E | 0.4 |
| CB589 | D196R/K197M/K199E | D60R/K60aM/K60cE | 0.6 |
| CB590 | D196R/K197M/K199E/R290E | D60R/K60aM/K60cE/R147E | 0.9 |
| CB591 | L305V/S314E/L337A/F374Y | L163V/S170bE/K188A/F225Y | 0.6 |
| CB592 | M298Q | M156Q | 0.5 |
| CB593 | V158D/E296V/M298Q | V21D/E154V/M156Q | 0.8 |
| CB594 | V158D/E296V/M298Q/K337A | V21D/E154V/M156Q/K188A | 0.3 |
| CB595 | K197I | K60aI | 0.8 |
| CB596 | K197V | K60aV | 0.6 |
| CB597 | K197F | K60aF | <0.3 |
| CB598 | K197W | K60aW | <0.3 |
| CB599 | K197M | K60aM | 0.3 |
| CB600 | D196F | D60F | <0.3 |
| CB601 | D196Y | D60Y | <0.3 |
| CB602 | D196W | D60W | <0.3 |
| CB603 | D196L | D60L | <0.3 |
| CB604 | D196I | D60I | <0.3 |
| CB605 | G237W | G97W | <0.3 |
| CB606 | G237T | G97T | 0.3 |
| CB608 | G237V | G97V | 0.8 |
| CB609 | K341Q | K192Q | 12.2 |
| CB611 | K197L/D196L | K60aL/D60L | <0.3 |
| CB612 | K197L/D196F | K60aL/D60F | <0.3 |
| CB614 | K197L/D196W | K60aL/D60W | <0.3 |
| CB615 | K197E/D196F | K60aE/D60F | <0.3 |
| CB617 | K197E/D196V | K60aE/D60V | <0.3 |
| CB637 | K197E/K341Q | K60aE/K192Q | 80.7 |
| CB638 | K197L/K341Q | K60aL/K192Q | 39.0 |
| CB670 | G237V/K341Q | G97V/K192Q | 14.1 |
| CB671 | K197V/G237V/K341Q | K60aE/G97V/K192Q | 18.9 |
| CB688 | K197E/K199E | K60aE/K60cE | 2.1 |
| CB689 | K197E/G237V | K60aE/G97V | 1.7 |
| CB691 | K197E/K199E/K341Q | K60aE/K60cE/K192Q | 34.3 |
| CB692 | K197E/G237V/M298Q/K341Q | K60aE/G97V/M156Q/K192Q | 15.2 |
| CB693 | K197E/K199E/G237V/M298Q/ | K60aE/K60cE/G97V/M156Q/ | 22.1 |
| | K341Q | K192Q | |
| CB694 | K199E/K341Q | K60cE/K192Q | 19.1 |
| CB696 | G237V/M298Q/K341Q | G97V/M156Q/K192Q | 3.2 |
| CB697 | R290N | R147N | 1.5 |
| CB698 | R290Q | R147Q | 1.2 |
| CB699 | R290K | R147K | 0.6 |
| CB700 | R290M | R147M | 1.0 |
| CB701 | R290V | R147V | 2.5 |
| CB733 | K341N | K192N | 10.7 |
| CB734 | K341M | K192M | 4.4 |
| CB735 | K341D | K192D | 148.0 |

### Example 14

### In Vivo Assessment of FVIIa Polypeptide Procoagulant Activity

[0577] Mouse model of hemophilia A was established to assess the procoagulant activity of FVIIa polypeptides. Hemophilia A was induced in CD-1 mice by administration of anti-FVIII antibodies, followed by surgical removal of the tips of the tails to initiate bleeding (similar to that described above, in Example 8). Mice deficient in FVIII (FVIII^{-/-} mice) also were used, but were not treated with anti-FVIII antibodies. The mice were then treated with FVIIa polypeptide and the amount of blood lost in 20 minutes was measured to determine the procoagulant activity of the FVIIa polypeptides.

A. Analysis of FVIIa Coagulant Activity in CD-1 Mice with Induced Hemophilia A

[0578] Initial experiments were carried out to determine the dose required and time and duration of effect of anti-human-FVIII antibodies when given by the intraperitoneal route to induce hemophilia in CD-1 mice. For the first lot of anti-FVIII (lot 1; Affinity Biologicals, lot IG129R4), this was based initially on the dose used for the cannulation experiments, described above in Example 8. The dose determined to cause a hemophilic state (uncontrolled bleeding over a 20 minute assay period) was 7.54 mg/mouse (80 μl of a 94.25 mg/ml stock solution). This lot had a neutralizing activity of 612 mouse BU/ml. For the second lot of anti-human FVIII (lot 2; Affinity Biologicals, lot IG1577R2, neutralizing activity of 474 mouse BU/ml) the dose used was 11.98 mg/mouse (120 μl of a 99.8 mg/ml stock solution) and was administered at 6 hours prior to tail cut.

[0579] To induce hemophilia, male CD-1 mice (25-35 g) were dosed intraperitoneally with lot 1 or lot 2 of anti-FVIII prior to the experiment. Male CD-1 and FVIII^{-/-} mice were anesthetized by intraperitoneal administration of a ketamine/xylazine cocktail (100 mg/mL solution) and placed on a heated platform (39° C.) to ensure there was no drop in body temperature. The procedure room was kept at a temperature of 82° F. Ten minutes prior to tail cut the tail was immersed in 10 mls of pre-warmed PBS (15 ml centrifuge tube; 39° C.). Eight to ten mice were injected with recombinant human FVIIa (Novoseven®, Novo Nordisk) or modified FVII polypeptides diluted in a buffer composed of 52 mM sodium chloride, 10.2 mM calcium chloride dehydrate, 9.84 mM glycylglycine, 0.01% polysorbate 80 and 165 mM mannitol via the tail vein in a single injection. Vehicle only also was injected into a group of mice as a control. If the injection was missed, the animal was excluded from the study. Injection with test agent or vehicle was made 5 minutes prior to tail cut. A tail cut was made using a razor blade 5 mm from the end of the tail and blood was collected into PBS for a period of 20 minutes. At the end of the collection period, total blood loss was assessed. The collection tubes were mixed and a 1 ml aliquot of each sample was taken and assayed for hemoglobin content. Triton X-100 was diluted 1 in 4 in sterile water and 100 μL was added to the 1 mL samples to cause hemolysis. The absorbance of the samples was then measured at a wavelength of 546 nm. To calculate the amount of blood lost, the absorbance was read against a standard curve generated by measuring the absorbance at 546 nm of known volumes of murine blood, diluted in PBS and hemolysed as above with Triton X 100.

[0580] A dose response study in which 0.3, 1 or 3 mg/kg of CB553 (wild-type FVIIa) was assessed also was performed. Mice that received the vehicle lost 1002.3±60.71 μL in the 20 minute assay. This was reduced significantly in mice that were administered 3 mg/kg of CB553, to 415.5±90.85 μL (p<0.05 using Kruskal-Wallis followed by Dunn's post test). Reducing the dose to 1 mg/kg resulted in blood loss of 679.57±83.95 μL and a lower dose of 0.3 mg/kg resulted in blood loss of 852.42±94.46 μL.

[0581] In a separate study, CB735 (K341D) and CB945 (M298Q/K341D) was assessed at a dose of 3 mg/kg. The vehicle only injection was used as a control. Groups of mice that received the vehicle only lost between 803±92.18 μL and 813.1±82.66 μL of blood in the 20 minute assay. This was similar to treatment with CB735 or CB945, which resulted in 746±110.5 μL and 870.9±78.38 μL blood loss, respectively.

### B. Analysis of FVIIa Coagulant Activity in FVIII^{-/-} Mice

[0582] A mouse model of hemophilia A using mice deficient in FVIII (FVIII^{-/-} mice) also was used to assess the coagulant activity of FVIIa polypeptides, saying the same protocols as described above except that the mice were not treated with anti-FVIII antibodies.

[0583] 1. Dose Response Study Assessing Wild-Type FVIIa Coagulant Activity

[0584] Dose response studies to assess the coagulant activity of NovoSeven® and CB553 in FVIII^{-/-} mice at 0.3, 1, 3 and 6 mg/kg were performed. In the NovoSeven® experiment, the blood loss in the vehicle group was 912.79±38.32 μL, which was significantly reduced by NovoSeven® treatment at 6 and 3 mg/kg (to 361.74±55.28 μL and 586.98±60.56 μL; p<0.05 using Kruskal-Wallis followed by Dunn's post test). Reducing the dose to 1 mg/kg resulted in blood loss of 674.84±46.88 μL and at the lowest dose tested the value was 801.08±41.39 μL. In the CB553 experiment, the vehicle control group produced blood loss of 904.08±15.38 μL. This was reduced significantly (p<0.05 using Kruskal-Wallis followed by Dunn's post test) by CB553 at 6 mg/kg to 451.04±74.17 μL. Reducing the dose to 3 mg/kg produced a blood loss value of 695.75±60.50 μL while lowering the dose further to 1 and 0.3 mg/kg resulted in blood loss values near and at vehicle control levels (846.08±34.17 μL and 936.43±31.39 μL, respectively).

### Example 15

### Determination of Factor VIIa Binding to Soluble Tissue Factor

[0585] The ability of the FVIIa variants expressed from HEK 293 or BHK cells to bind soluble tissue factor (sTF) was assessed using Biacore surface plasmon resonance. The FVIIa variants are assessed through measurement of the binding profile at three protease concentrations in two duplicate experiments, using two different levels of sTF bound to a Biacore CM5 chip.

[0586] A new Series S CM5 sensor chip (GE Healthcare Cat #BR1006-68) was coupled with bovine serum albumin and soluble tissue factor using a Biacore T100 instrument. Coupling was effected using Biacore Coupling Buffer (30 mM Na Hepes pH 7.4, 135 mM NaCl, 1 mM EDTA, 0.01% Tween-20) with an Amine coupling kit (GE Healthcare Cat # BR-1000-50) and the protocol wizard in the Biacore T100 software. For the immobilization, all four cells of the chip were used. Cells 1 and 3 were be coupled with 500 response units (RU) bovine serum albumin reference protein diluted in Acetate buffer, pH 4.0 and cells 2 and 4 were coupled with 500 and 250 RU of sTF (R&D Systems) diluted in Acetate buffer, pH 4.5.

[0587] Each FVIIa variant, and the wild-type FVIIa protease, was tested at three concentrations and in duplicate. The proteases were diluted to 60 nM, 30 nM and 15 nM in 100 μL Biacore Assay buffer (200 mM Na Hepes, pH 7.4, 150 mM NaCl, 5 mM CaCl₂, 0.1% PEG 8000, 0.1% BSA, 0.01% Tween-20) in a 96 well assay plate. Assay Each sample was assayed in the Biacore T100 instrument using 120 seconds of contact time followed by 180 seconds of dissociation time at a 10 μL/min flow rate. A buffer blank also was assayed. The chip was regenerated with 50 mM EDTA, pH 7.0 for 60 seconds then 30 seconds. The assay to measure binding of wild-type FVIIa to sTF should yield three sets of curves that give a K_{d} of approximately 8 nM.

[0588] Biacore T100 Evaluation software was used to analyze the data. Specifically, the Kinetics/Affinity 1:1 Binding analysis, which fits the data to the Langmuir isotherm, was utilized and the data was individually fit for two replicates of each variant at two response unit couplings. The four fit K_{d} values were averaged and are presented in Table 22. FVIIa polypeptides containing the M156Q mutation tended to have lower K_{d} results and thus bind more tightly to sTF.

TABLE 22
Binding of FVIIa variants to soluble TF

| | | | Affinity | |
|---|---|---|---|---|
| | | | Kd (nM) | |
| | Mutation (mature FVII | Mutation (chymotrypsin | HEK | |
| ID | numbering) | numbering) | 293 | BHK |
| CB553 | WT | WT | 7.9 | 9.0 |
| CB592 | M298Q | M156Q | 3.9 | |
| CB593 | V158D/E296V/M298Q | V21D/E154V/M156Q | 8.0 | |
| CB669 | V158D/G237V/E296V/M298Q | V21D/E154V/M156Q/G97V | 14.9 | |
| CB690 | K197E/G237V/M298Q | K60aE/G97V/M156Q | 4.8 | |
| CB691 | K197E/K199E/K341Q | K60aE/K60cE/K192Q | 6.6 | |
| CB692 | K197E/G237V/M298Q/K341Q | K60aE/G97V/M156Q/K192Q | 5.9 | |
| CB693 | K197E/K199E/G237V/M298Q/ | K60aE/K60cE/G97V/M156Q/ | 6.4 | |
| | K341Q | K192Q | | |
| CB695 | G237V/M298Q | G97V/M156Q | 3.8 | |
| CB696 | G237V/M298Q/K341Q | G97V/M156Q/K192Q | 2.5 | |
| CB946 | M298Q/K341D | M156Q/K192D | 7.9 | |

### Example 16

### Surface Plasmon Resonance (SPR) Screening of FVIIa Variants for Resistance to TFPI

[0589] The relative resistance of various FVIIa variants to inhibition by human recombinant soluble TFPI was evaluated using a high-throughput surface plasmin resonance (SPR) assay with the Biacore T100 instrument. The relative resistance of FVIIa variants to inhibition by TFPI was assessed by measurement of the relative amount of FVIIa variant bound to soluble TFPI immobilized on a Biacore CM5 sensor chip compared to the amount of wild-type FVIIa bound subsequent to a standardized injection time and protease concentration.

[0590] For every experiment, soluble TFPI (R&D Systems) was immobilized to a new 4-flow cell Biacore CM5 Series S sensor chip (GE Healthcare) using the amine coupling protocol available within the Biacore T-100 control Software (GE Healthcare) and the reagents provided with the Amine Coupling Kit (GE Healthcare). All four available flow cells were utilized for immobilization of two different densities of TFPI and bovine serum albumin (BSA), which served as a blocking agent in the reference cells. BSA was diluted to 5 μg/mL in sodium acetate (pH 4.0) and immobilized in flow-cells 1 and 3 at 1000 and 2000 response units (RU), respectively. For TFPI immobilization, lyophilized soluble TFPI (10 μg) was resuspended in 100 μL of IX Coupling Buffer (30 mM Hepes, 135 mM NaCl, 1 mM EDTA, 0.01% Tween-20, pH 7.4) to a concentration of 0.1 mg/mL. A total of 20 μL of 0.1 mg/mL TFPI as diluted to 10 μg/mL in sodium acetate pH 4.0 for immobilization to flow-cells 2 and 4 at 1000 and 2000 RU, respectively. Coupling buffer was used as the running buffer during the immobilization steps.

[0591] Each sample of FVIIa was prepared at a final concentration of 320 nM in I X Running Buffer (20 mM Hepes, 150 mM NaCl, 5 mM CaCl2, 0.1% PEG 8000, 0.1% BSA, 0.01% Tween-20, pH 7.4) containing 620 nM sTF (Human Coagulation Factor III; R&D Systems). Generally, each FVIIa variant was diluted 10-fold into IX Running Buffer before the final dilution of 320 nM. FVIIa/sTF complexes were prepared at a final volume of 120 μL in duplicate allowing for up to 48 unique FVIIa variants to be loaded into a 96-well storage plate and evaluated with duplicate injections in a single run. The FVIIa/sTF complex was incubated at RT for 10-15 min before initiation of the first sample injection.

[0592] A standardized binding analysis method was created within the Biacore Control Software (GE Healthcare) in which every FVIIa replicate is injected for 180 seconds of association time followed by a short 60 seconds of dissociation at a flow rate of 10 μL/min. Regeneration of the sensor chip followed the dissociation phase for 30 seconds with 10 mM glycine, 500 mM NaCl, pH 3.0 and then a 60 second stabilization period with 1× Running Buffer at the same 10 μL/min flow rate. Two assay reference points were recorded for each run and subsequent data analysis, one 5 seconds prior to the conclusion of the association phase (binding) and a second reported 5 seconds before the conclusion of the dissociation phase (dissociation). Before initiating a full assay, the sensor chip was tested with a single injection of 320 nM wild-type FVIIa/sTF for 180 seconds, which should give a response of approximately 400-450 RU and 750-850 RU for binding to flow-cells 2 (1000 RU) and 4 (200 RU), respectively.

[0593] Data analysis was performed first with the Biacore T100 Evaluation Software (GE Healthcare) to inspect the assay validation parameters, which include verifying that binding to the reference cell is minimal, baseline drift and the binding of control blank injections (running buffer). Data tables were generated within this application that indicated the amount of FVIIa variant bound (in RU) at both the binding report point and the dissociation report point. The data tables were subsequently exported for further analysis within the Microsoft Excel spreadsheet environment. The raw data points (RU bound) were corrected for control binding to the sensor chip and then a ratio of the amount of wild-type FVIIa bound (in RU) to the amount of FVIIa variant bound (in RU) was taken for each parameter and reported as Binding (wt/variant) and Dissociation (wt/variant). Resistance to TFPI inhibition is reflected as an increase in the ratio for one or both of the evaluated parameters. For instance, a Binding (wt/variant) or Dissociation (wt/variant) value of 20 for a particular FVIIa variant indicates that that variant is 20-fold more resistant to TFPI inhibition than wild-type FVIIa. Several variants exhibited increased resistance to TFPI inhibition. For example, CB609, CB637, CB691, CB856 and CB857 are among the group that exhibited 20 to 60-fold resistance and variants containing the K341D by mature FVII numbering (corresponding to by chymotrypsin numbering) such as CB735, have ratios indicating significant resistance to TFPI (greater than 50-150-fold) and a variants containing the K192D mutation 9CB945) has a ratio indicating significant resistance to TFPI (greater than 40-150-fold). In some cases, the rate of dissociation was affected more than the rate of association. Some examples of variants that exhibited this profile are CB735, CB854, CB855, CB856 and CB857.

TABLE 23
Resistance of FVIIa variants to inhibition by TFPI

| | | | TF-Dependent TFPI Resistance Assay | | | |
|---|---|---|---|---|---|---|
| | | | 293-F Cells | | BHK-21 Cells | |
| | | | Binding | Dissociation | Binding | Dissociation |
| | Mutation (mature FVII | Mutation (Chymotrypsin | (wt/ | (wt/ | (wt/ | (wt/ |
| ID | Numbering) | Numbering) | variant) | variant) | variant) | variant) |
| CB553 | WT | WT | 1.0 | 1.0 | 1.0 | 1.0 |
| CB558 | K197A | K60aE | 1.4 | 1.3 | | |
| CB563 | K197E | K60cE | 1.4 | 1.4 | | |
| CB592 | M298Q | M156Q | 1.9 | 1.8 | | |
| CB593 | V158D/E296V/M298Q | V21D/E154V/M156Q | 0.8 | 0.8 | 1.0 | 1.0 |
| CB608 | G237V | G97V | 2.2 | 1.8 | | |
| CB609 | K341Q | K192Q | 13.0 | 19.7 | | |
| CB637 | K197E/K341Q | K60aE/K192Q | 67.2 | 171.1 | | |
| CB670 | G237V/K341Q | K192Q/G97V | 12.8 | 12.4 | | |
| CB671 | K197V/G237V/K341Q | K60aE/K192Q/G97V | 18.9 | 21.8 | | |
| CB688 | K197E/K199E | K60aE/K60cE | 2.2 | 2.1 | | |
| CB689 | K197E/G237V | K60aE/G97V | 1.8 | 1.6 | | |
| CB691 | K197E/K199E/K341Q | K60aE/K60cE/K192Q | 33.9 | 68.1 | | |
| CB692 | K197E/G237V/M298Q/K341Q | K60aE/G97V/M156Q/K192Q | 15.9 | 21.5 | | |
| CB693 | K197E/K199E/G237V/M298Q/ | K60aE/K60cE/G97V/M156Q/ | 23.4 | 43.5 | | |
| | K341Q | K192Q | | | | |
| CB694 | K199E/K341Q | K60cE/K192Q | 18.8 | 30.7 | | |
| CB695 | G237V/M298Q | G97V/M156Q | 0.9 | 0.8 | | |
| CB696 | G237V/M298Q/K341Q | G97V/M156Q/K192Q | 4.5 | 6.0 | | |
| CB697 | R290N | R147N | 1.6 | 1.5 | | |
| CB698 | R290Q | R147Q | 1.3 | 1.2 | | |
| CB699 | R290K | R147K | 0.7 | 0.7 | | |
| CB700 | R290M | R147M | 1.1 | 1.1 | | |
| CB701 | R290V | R147V | 2.6 | 2.7 | | |
| CB733 | K341N | K192N | 11.3 | 63.8 | | |
| CB734 | K341M | K192M | 4.9 | 5.4 | | |
| CB735 | K341D | K192D | 185.6 | 380.7 | | |
| CB853 | G237T238insA | G97T98insA | | | 6.5 | 18.2 |
| CB854 | G237T238insS | G97T98insS | | | 5.2 | 13.0 |
| CB855 | G237T238insV | G97T98insV | | | 7.3 | 16.8 |
| CB856 | G237T238insAS | G97T98insAS | | | 22.8 | 154.5 |
| CB857 | G237T238insSA | G97T98insSA | | | 21.5 | 146.5 |
| CB858 | D196K197insK | D60K60ainsK | | | 1.0 | 0.8 |
| CB859 | D196K197insR | D60K60ainsR | | | 0.5 | 0.5 |
| CB862 | D196K197insA | D60K60ainsA | | | 0.5 | 0.4 |
| CB863 | D196K197insM | D60K60ainsM | | | 0.4 | 0.4 |
| CB864 | K197I198insE | K60aI60binsE | | | 1.3 | 1.1 |
| CB865 | K197I198insY | K60aI60binsY | | | 1.1 | 1.0 |
| CB867 | K197I198insS | K60aI60binsS | | | 0.7 | 0.6 |
| CB902 | K197E/M298Q | K60aE/M156Q | 2.6 | 2.3 | | |
| CB945 | M298Q/K341D | M156Q/K192D | 146.8 | 196.5 | | |

### Example 17

### Determination of the Concentration of Catalytically Active Protease Using the Active Site Titrant 4-methylumbelliferyl p-guanidinobenzoate (MUGB)

[0594] The concentration of catalytically active FVIIa in a stock solution was determined by titrating a complex FVIIa and soluble tissue factor (sTF) with 4-methylumbelliferyl p′-guanidinobenzoate (MUGB), a fluorogenic ester substrate developed as an active site for trypsin-like serine proteases. The assay was carried out essentially as described by Payne et al. (Biochemistry (1996) 35:7100-7106) with a few minor modifications. MUGB readily reacts with FVIIa, but not FVII or inactive protease, to form an effectively stable acyl-enzyme intermediate under conditions in which the concentration of MUGB is saturating and deacylation is especially slow and rate limiting for catalysis. Under these conditions, the FVIIa protease undergoes a single catalytic turnover to release the 4-methylumbelliferone fluorophore (4-MU). When the initial burst of fluorescence is calibrated to an external concentration standard curve of 4-MU fluorescence, the concentration of active sites may be calculated.

[0595] Assays were performed with a 2 mL reaction volume in a 1 cm×1 cm quartz cuvette under continuous stirring. Each reaction contained 0.5 μM sTF (R&D Systems Human) in an assay buffer containing 50 mM Hepes, 100 mM NaCl, 5 mM CaCl₂ and 0.1% PEG 8000, PH 7.6. The 4-MU standard solution was freshly prepared at a stock concentration of 0.5 M in DMSO and the concentration confirmed by absorbance spectroscopy at 360 nm using an extinction coefficient of 19,000 M-1 cm-1 in 50 mM Tris buffer, pH 9.0. MUGB was prepared at a stock concentration of 0.04 M in DMSO based on the dry weight. Assays were initiated by adding 4 μL of 4 mM MUGB (8 μM final concentration) to a solution of 0.5 μM sTF (20.2 μL of 49.4 μM sTF) in 1× assay buffer and first measuring the background hydrolysis of MUGB for ˜150-200 seconds before the addition of FVIIa or FVIIa variant to a final concentration of ˜100-200 nM based on the initial ELISA (Example 2C.1) or the active site titration with FFR-CMK (Example 6). The release of 4-MU fluorescence in the burst phase of the reaction was followed for an additional 1000-1200 seconds. A standard curve of free 4-MU was prepared by titration of the absorbance-calibrated 4-MU into 1× assay buffer containing 0.5 μM sTF in 20 nM steps in to a final concentration of 250 nM.

[0596] For data analysis, reaction traces were imported into the Graphpad Prism software package and the contribution of background hydrolysis was subtracted from the curve by extrapolation of the initial measured rate of spontaneous MUGB hydrolysis, which was typically less than 5% of the total fluorescence burst. The corrected curve was fit to a single exponential equation with a linear component (to account for the slow rate of deacylation) of the form ΔFluorescence=Amp(1-e^{-kt})+Bt, where Amp=the amplitude of the burst phase under the saturating assay conditions outline above, k is the observed first order rate constant for acyl-enzyme formation and B is a bulk rate constant associated with complete turnover of MUGB. The concentration of active FVIIa protease is calculated by comparison of the fit parameter for amplitude to the 4-MU standard curve. The values from multiple assays were measured, averaged and the standard deviation determined.

Since modifications will be apparent to those of skill in this art, it is intended that this invention be limited only by the scope of the appended claims.

The application's sequence listing, which the Patent Office published only in electronic form, follows.

SEQUENCE LISTING (250 sequences)

SEQ ID NO: 1 - protein, 466 aa, Homo sapiens
  Factor VII precursor isoform a
MVSQALRLLCLLLGLQGCLAAGGVAKASGGETRDMPWKPGPHRVFVTQEEAHGVLHRRRRANAFLEELRPGSLERECKEEQCSFEEAREIFKDAERTKLFWISYSDGDQCASSPCQNGGSCKDQLQSYICFCLPAFEGRNCETHKDDQLICVNENGGCEQYCSDHTGTKRSCRCHEGYSLLADGVSCTPTVEYPCGKIPILEKRNASKPQGRIVGGKVCPKGECPWQVLLLVNGAQLCGGTLINTIWVVSAAHCFDKIKNWRNLIAVLGEHDLSEHDGDEQSRRVAQVIIPSTYVPGTTNHDIALLRLHQPVVLTDHVVPLCLPERTFSERTLAFVRFSLVSGWGQLLDRGATALELMVLNVPRLMTQDCLQQSRKVGDSPNITEYMFCAGYSDGSKDSCKGDSGGPHATHYRGTWYLTGIVSWGQGCATVGHFGVYTRVSQYIEWLQKLMRSEPRPGVLLRAPFP

SEQ ID NO: 2 - protein, 444 aa, Homo sapiens
  Factor VII precursor isoform b
MVSQALRLLCLLLGLQGCLAAVFVTQEEAHGVLHRRRRANAFLEELRPGSLERECKEEQCSFEEAREIFKDAERTKLFWISYSDGDQCASSPCQNGGSCKDQLQSYICFCLPAFEGRNCETHKDDQLICVNENGGCEQYCSDHTGTKRSCRCHEGYSLLADGVSCTPTVEYPCGKIPILEKRNASKPQGRIVGGKVCPKGECPWQVLLLVNGAQLCGGTLINTIWVVSAAHCFDKIKNWRNLIAVLGEHDLSEHDGDEQSRRVAQVIIPSTYVPGTTNHDIALLRLHQPVVLTDHVVPLCLPERTFSERTLAFVRFSLVSGWGQLLDRGATALELMVLNVPRLMTQDCLQQSRKVGDSPNITEYMFCAGYSDGSKDSCKGDSGGPHATHYRGTWYLTGIVSWGQGCATVGHFGVYTRVSQYIEWLQKLMRSEPRPGVLLRAPFP

SEQ ID NO: 3 - protein, 406 aa, Homo sapiens [sequence omitted]

SEQ ID NO: 4 - protein, 447 aa, Bos taurus
  Factor VII precursor
MLSQAWALALLCFLLSLWGSLPAVFLPQEQALSILHRPRRANGFLEELLPGSLERECREELCSFEEAHEIFRNEERTRQFWVSYNDGDQCASSPCQNGGSCEDQLRSYICFCPDGFEGRNCETDKQSQLICANDNGGCEQYCGADPGAGRFCWCHEGYALQADGVSCAPTVEYPCGKIPVLEKRNGSKPQGRIVGGHVCPKGECPWQAMLKLNGALLCGGTLVGPAWVVSAAHCFERLRSRGNLTAVLGEHDLSRVEGPEQERRVAQIIVPKQYVPGQTDHDVALLQLAQPVALGDHVAPLCLPDPDFADQTLAFVRFSAVSGWGQLLERGVTARKLMVVLVPRLLTQDCLQQSRQRPGGPVVTDNMFCAGYSDGSKDACKGDSGGPHATRFRGTWFLTGVVSWGEGCAAAGHFGIYTRVSRYTAWLRQLMGHPPSRQGFFQVPLLP

SEQ ID NO: 5 - protein, 446 aa, Mus musculus
  Factor VII precursor
MVPQAHGLLLLCFLLQLQGPLGTAVFITQEEAHGVLHRQRRANSLLEELWPGSLERECNEEQCSFEEAREIFKSPERTKQFWIVYSDGDQCASNPCQNGGTCQDHLKSYVCFCLLDFEGRNCEKSKNEQLICANENGDCDQYCRDHVGTKRTCSCHEDYTLQPDEVSCKPKVEYPCGRIPVVEKRNSSSRQGRIVGGNVCPKGECPWQAVLKINGLLLCGAVLLDARWIVTAAHCFDNIRYWGNITVVMGEHDFSEKDGDEQVRRVTQVIMPDKYIRGKINHDIALLRLHRPVTFTDYVVPLCLPEKSFSENTLARIRFSRVSGWGQLLDRGATALELMSIEVPRLMTQDCLEHAKHSSNTPKITENMFCAGYMDGTKDACKGDSGGPHATHYHGTWYLTGVVSWGEGCAAIGHIGVYTRVSQYIDWLVRHMDSKLQVGVFRLPLL

SEQ ID NO: 6 - protein, 466 aa, Pan paniscus
  Factor VII precursor
  UNSURE (0)...(0): Xaa could be any amino acid
MVSQALRLLCLLLGLQGCLAAGGVAEASGGETRDMPWKPGPHRVFITQEEAHGVLHRRRRANAFLEELRPGSLERECKEEQCSFEEAREIFKDLERTKLFWISYSDGDQCASSPCQNGGSCKDQLQSYICFCLPAFEGRNCETYKDDQLICVNENGGCEQYCSDHTGTKRSCRCHEGYSLLADGVSCTPTVEYPCGKIPILENRNASKPQGRIVGGKVCPKGECPWQXLLXVNGAQLCGGTLINTIWVASAAHCFDKIKNWRNLIAVLGEHDLSEHDGDEQSRRVAQVIIPSTYIPGTTNHDIALLRLHQPVVLTDHVVPLCLPERAFSERTLAFVRFSLVSGWGQLLDRGATALELMVLNVPRLMTQDCLQQSRKVGDSPNITEYMFCAGYSDGSKDSCKGDSGGPHATHYRGTWYLTGIVSWGQGCASVGHFGVYTRVSQYIEWLQKLMRSEPRPGVLLRAPFP

SEQ ID NO: 7 - protein, 466 aa, Pan troglodytes
  Factor VII precursor
  UNSURE (0)...(0): Xaa could be any amino acid
MVSQALRLLCLLLGLQGCLAAGGVAEASGGETRDXXWKPGPHRVFITQEEAHGVLHRRRRANAFLEELRPGSLERECKEEQCSFEEAREIFKDLERTKLFWISYSDGDQCASSPCQNGGSCKDQLQSYICFCLPAFEGRNCETYKDDQLICVNENGGCEQYCSDHTGTKRSCRCHEGYSLLADGVSCTPTVEYPCGKIPILEKRNASKPQGRIVGGKVCPKGECPWQVLLLVNGAQLCGGTLINTIWVVSAAHCFDKIKNWRNLIAVLGEHDLSEHDGDEQSRRVAQVIIPSTYIPGTTNHDIALLRLHQPVVLTDHVVPLCLPERAFSERTLAFVRFSLVSGWGQLLDRGATALELMVLNVPRLMTQDCLQQSRKVGDSPNITEYMFCAGYSDGSKDSCKGDSGGPHATHYRGTWYLTGIVSWGQGCASVGHFGVYTRVSQYIEWLQKLMRSEPRPGVLLRAPFP

SEQ ID NO: 8 - protein, 444 aa, Oryctolagus cuniculus
  Factor VII precursor
MAPQARGLGLCSLLALQASLAAVFITQEEAHSVLRRQRRANSFLEELRPGSLERECKEELCSFEEAREVFQSTERTKQFWITYNDGDQCASNPCQNGGSCEDQIQSYICFCLADFEGRNCEKNKNDQLICMYENGGCEQYCSDHVGSQRSCRCHEGYTLLPNGVSCTPTVDYPCGKVPALEKRGASNPQGRIVGGKVCPKGECPWQAALMNGSTLLCGGSLLDTHWVVSAAHCFDKLSSLRNLTIVLGEHDLSEHEGDEQVRHVAQLIMPDKYVPGKTDHDIALLRLLQPAALTNNVVPLCLPERNFSESTLATIRFSRVSGWGQLLYRGALARELMAIDVPRLMTQDCVEQSEHKPGSPEVTGNMFCAGYLDGSKDACKGDSGGPHATSYHGTWYLTGVVSWGEGCAAVGHVGVYTRVSRYTEWLSRLMRSKLHHGIQRHPFP

SEQ ID NO: 9 - protein, 446 aa, Rattus norvegicus
  Factor VII precursor
MVPQTHGLLLLYFLLQLQGPLGAVVFITQEEAHGVLHRQRRANSLLEELWSSSLERECNEERCSFEEAREIFKSPERTKQFWTIYSDGDQCASNPCQNGGTCQDHLKSYVCFCPLDFEGRNCEKNKNEQLICANENGDCDQYCRDHVGTKRTCSCHEDYVLQPDEVSCKPKVEYPCGRIPVVEKRNFSRPQGRIVGGYVCPKGECPWQAVLKFNEALLCGAVLLDTRWIVTAAHCFDKFGKLVNITVVLGEHDFSEKEGTEQVRLVEQVIMPNKYTRGRTDHDIALVRLHRPVTFTDYVVPLCLPERAFSENTLASIRFSRVSGWGQLLDRGATALELMVIEVPRLMTQDCLEHAKHSANTPRITENMFCAGYMDGTKDACKGDSGGPHATHYHGTWYLTGVVSWGEGCAAIGHIGVYTRVSQYIDWLVKYMDSKLRVGISRVSLL

SEQ ID NO: 10 - protein, 469 aa, Macaca mulatta
  Factor VII precursor
MVSRALGLLCLLLGLQGCLAAATFLPQAGSLRPQEEKTQDLLWKPGPHRVFVTQEEAHGVLHRQRRANSFLEELRPGSLERECKEEQCSFEEAREIFKDLERTKLFWISYSDGDQCASNPCQNGGSCKDQLQSYICFCLPSFEGRNYKDDQLICVNENGGCEQYCSDHAGAKRSCWCHEGYSLLADGVSCMPTVEYPCGKIPILEKRNASKPQGRIVGGRVCPKGECPWQVLLLVNGAQLCGGTLINTIWVVSAAHCFDKIKSWRNLTAVLGEHDLSEHEGDEQSRRVAQVIIPSTYVLGATNHDIALLRLQQPVVLTDHVVPLCLPERMFSERTLAFVRFSLVSGWGQLLDRGATALELMALNVPRLMTQDCLQQSQKAEASPNITEYMFCAGYSDGSRDSCKGDSGGPHATRYRGTWYLTGIVSWGQGCAAVGHFGVYTRVSQYIEWLQKLMHSEPRPGVLLRAPFP

SEQ ID NO: 11 - protein, 445 aa, Sus scrofa
  Factor VII precursor (isoform b)
MASLRPALLCLLLCLQGSLAAVFVGHEEAHSLLHRFRRANSFLEELWPGSLERECREEQCSFEEAREIFKSEERTRQFWVSYNDGDQCASNPCLNGGSCEDQLQAYICFCPEGFEGRNCETNKKSQLICMNDNGGCEQYCSDHAEAGRSCWCHEGYALQEDGVSCEPTVEYPCGKIPVLEKRNDSNPQGRIVGGKVCPKGECPWQAMLKLKGALLCGGTLLNTSWVVSAAHCFDRIRSWKDLTVVLGEHDLSKDEGDEQERPVAQVFVPDKYVPGKTDHDLALVRLARPVALTDHVVPLCLPERSFSERTLAFIRFSAVSGWGRLLDRGAKARVLMAIQVPRLMTQDCLEQARRRPGSPSITDNMFCAGYLDGSKDACKGDSGGPHATRFRGTWFLTGVVSWGEGCAATGRFGVYTRVSRYTAWLLGLMSAPPPPSEGLLRAPLP

SEQ ID NO: 12 - protein, 446 aa, Canis familiaris
  Factor VII precursor
MVAWAGELALLCFLLGLQGSLAAVFLTQEEAQGVLHRQRRANSFLEELRAGSLERECREEQCSFEEAREIFQDVDRTRQFWISYKDGDQCASNPCQNGGSCEDQLQSYICFCPDDFQGRNCETDKKDQLICMNENGGCQQYCSDHAEARRSCWCHEGYTLQDDGVSCMPIVEYPCGKIPVLEKRIGSNPQGRIVGGKVCPKGECPWQAAVKVDGKLLCGGTLIDAAWVVSAAHCFERIKNWKNLTVVLGEHDLSEDDGDEQERHVARVIVPDKYIPLKTNHDIALLHLRTPVAYTDHVVPLCLPEKTFSERTLAFIRFSTVSGWGQLLDRGATALQLMAIDVPRVMTQDCQEQSRRRSGSPAITENMFCAGYLDGSKDACQGDSGGPHATKFQGTWYLTGVVSWGEGCAAEGHFGVYTRVSQYIEWLRQLMVSSHTLRGLLRAPLP

SEQ ID NO: 13 - protein, 433 aa, Brachydanio rerio
  Factor VII precursor
MSLLLVFSVLWSLHYCHSAAVFVHRDEAHEVLIRSKRANSGWFEELKTGNLERECLEEKCSYEGAREVFEHTEATNEFWKIYDVKDHCASSPCEHDGLCTTQNADSYMCLCAPGFSGRHCEQSIGDVPDSCLHDNGGCEHFCTEQDGRRNCSCADGYYLDNGGQKCRSHEVFPCGKVPLLQAGKAADHQVDLRSRIVGGSECPKGHCPWQVLLKYGEKGFCGGVIYKPTWILTAAHCLEKLKVKFLRIVAGEHDLEVDEGTEQLIQVDQMFTHPAYVSETADSDIALLRLRTPIVYSVYAVPVCLPLREMAERELWAVSKHTVSGWGKRSEDGPTSRLLRRLLVPRIRTQECVQVSNLTLTSNMFCAGYIEGRQDSCKGDSGGPLVTRYRDTAFLLGIVSWGKGCARPGSYGIYTRVSNYLQWIRQTTNTTIH

SEQ ID NO: 14 - protein, 441 aa, Fugu rubripes
  Factor VII precursor
MRLRVFFTLVFTFTHCRAASVFLDADKAHDVLVRTRRYNSGWLEELQKGDLKRECLEEICSYEEAREVFEHTKTTDEFWKIYNRPNSCKSNPCLNGGSCSAEGSSYTCFCLPEFSGVDCELEYQTVPDTCLLENGGCEHFCHENSAGQRGNCSCADGYDLDVDGLSCKAKESVACGMVLSAQFEHNQLNPRARIVGGNECPKGECPWQVLLVYKGKGFCGGVIYKPTWILTASHCMADIDVQFLKVVAGEHNTEVDEGTEQIIQVSEIIMHEKYVPRTADNDIALLHLAVPITYTTYAIPVCLPTRPLAERELWAVSLHTVSGWGRRSENGPTSHLLRQLKVPRIRTQQCIEESGVVLTQNMFCAGYMEGRQDSCKGDSGGPLVTKYKKTVFLLGIVSWGKGCARPGNYGIYTRVANYLEWIHNRTATVNQPTNNTENFTT

SEQ ID NO: 15 - protein, 425 aa, Gallus gallus
  Factor VII precursor
MVSRQCVALLLCFPLLVPPSLEAVFLKQEEANSIFQRHRRANSFFEEIKLGPLERECIEEKCSFEEAREIYRDDERTKEFWHIYSDPNQCDSSPCQNGGSCDDQFQDYVCRCPPEYEGKSCETAVAENLKCIYDNGGCEQYCADEQSEKRVCFCAEGYALASDGVSCIPQVKYPCGTIPVLARKNTTAQGRIVGGVTCPPGECPWQALIIQDQKGKCGGSLLSPEWVVTAAHCLDYAHSKQLRVRLGEYSVKVAEKTEQESGVSKIIRHEEYTIGQVNHDIALLKLETPVNLTDFVVPICLPEKRFAVYELSSIKFSMVSGWGRLLDGGATSTFLMRVHLPRVKTQECEKQANLNITENMFCAGDLTGKKDSCKGDSGGPHATKYKNTWFLTGIVSWGKGCAVEGSYGVYTRVSRYINWLKRHME

SEQ ID NO: 16 - protein, 444 aa, Pongo pygmaeus
  Factor VII (fragment)
GVAEASGGETRDMQWKLGPHRVFITQEEAHGVLHRRRRANTFLEELRPGSLERECKEEQCSFEEAREIFKDLERTKLFWISYSDGDQCASSPCQNGGSCKDQLQSYICFCLPDFEGRNCEMYKDDQLICVNENGGCEQYCSDHMGAKRSCWCHEGYSLLADGVSCTPTVEYPCGKIPILEKRNASKPQGRIVGGKVCPKGECPWQVLLLVNGAQLCGGTLINTIWVVSAAHCFDKIKNWRNLIAVLGEHDLSERDGDEQSRRVAQVIIPSTYVPGTTNHDIALLRLHQPVVLTDHVVPLCLPERTFSERTLAFVRFSLVSGWGQLLDRGATALELMALNVPRLMTQDCLQQSRKVGDSPNITEYMFCAGYSDGSKDSCKGDSGGPHATRYRGTWYLTGIVSWGQGCAAVGHFGVYTRVSQYIEWLQKLMCSEPRPGVLLRAPFP

SEQ ID NO: 17 - protein, 221 aa, Gorilla gorilla
  Factor VII (fragment)
  UNSURE (0)...(0): Xaa could be any amino acid
IWVVSAAHCFDKIKNWRNLIAVLGEHDLSEHDGDEQSRRVAQVIIPSMYVPGTTNHDIALLRLHQPVVLTDHVVPLCLPERTFSERTLAFVRFSLVSGWGQLLDRGATALELMVLNVPRLMTQDCLQQSRKVGDSPNITEYMFCAGYSDGSKDSCKGDSGGPHATHYRGTWXLTGIXSWGQGCATVGHFGVYTRVSQYIEWLQKLMRSEPRPGVLLRAPFP

SEQ ID NO: 18 - protein, 406 aa, Homo sapiens
  factor VIIa variant D60K
ANAFLEELRPGSLERECKEEQCSFEEAREIFKDAERTKLFWISYSDGDQCASSPCQNGGSCKDQLQSYICFCLPAFEGRNCETHKDDQLICVNENGGCEQYCSDHTGTKRSCRCHEGYSLLADGVSCTPTVEYPCGKIPILEKRNASKPQGRIVGGKVCPKGECPWQVLLLVNGAQLCGGTLINTIWVVSAAHCFKKIKNWRNLIAVLGEHDLSEHDGDEQSRRVAQVIIPSTYVPGTTNHDIALLRLHQPVVLTDHVVPLCLPERTFSERTLAFVRFSLVSGWGQLLDRGATALELMVLNVPRLMTQDCLQQSRKVGDSPNITEYMFCAGYSDGSKDSCKGDSGGPHATHYRGTWYLTGIVSWGQGCATVGHFGVYTRVSQYIEWLQKLMRSEPRPGVLLRAPFP

SEQ ID NO: 19 - protein, 406 aa, Homo sapiens
  Factor VIIa variant D60R
ANAFLEELRPGSLERECKEEQCSFEEAREIFKDAERTKLFWISYSDGDQCASSPCQNGGSCKDQLQSYICFCLPAFEGRNCETHKDDQLICVNENGGCEQYCSDHTGTKRSCRCHEGYSLLADGVSCTPTVEYPCGKIPILEKRNASKPQGRIVGGKVCPKGECPWQVLLLVNGAQLCGGTLINTIWVVSAAHCFRKIKNWRNLIAVLGEHDLSEHDGDEQSRRVAQVIIPSTYVPGTTNHDIALLRLHQPVVLTDHVVPLCLPERTFSERTLAFVRFSLVSGWGQLLDRGATALELMVLNVPRLMTQDCLQQSRKVGDSPNITEYMFCAGYSDGSKDSCKGDSGGPHATHYRGTWYLTGIVSWGQGCATVGHFGVYTRVSQYIEWLQKLMRSEPRPGVLLRAPFP

SEQ ID NO: 20 - protein, 406 aa, Homo sapiens
  Factor VIIa variant D60A
ANAFLEELRPGSLERECKEEQCSFEEAREIFKDAERTKLFWISYSDGDQCASSPCQNGGSCKDQLQSYICFCLPAFEGRNCETHKDDQLICVNENGGCEQYCSDHTGTKRSCRCHEGYSLLADGVSCTPTVEYPCGKIPILEKRNASKPQGRIVGGKVCPKGECPWQVLLLVNGAQLCGGTLINTIWVVSAAHCFAKIKNWRNLIAVLGEHDLSEHDGDEQSRRVAQVIIPSTYVPGTTNHDIALLRLHQPVVLTDHVVPLCLPERTFSERTLAFVRFSLVSGWGQLLDRGATALELMVLNVPRLMTQDCLQQSRKVGDSPNITEYMFCAGYSDGSKDSCKGDSGGPHATHYRGTWYLTGIVSWGQGCATVGHFGVYTRVSQYIEWLQKLMRSEPRPGVLLRAPFP

SEQ ID NO: 21 - protein, 406 aa, Homo sapiens
  Factor VIIa variant K60aY
ANAFLEELRPGSLERECKEEQCSFEEAREIFKDAERTKLFWISYSDGDQCASSPCQNGGSCKDQLQSYICFCLPAFEGRNCETHKDDQLICVNENGGCEQYCSDHTGTKRSCRCHEGYSLLADGVSCTPTVEYPCGKIPILEKRNASKPQGRIVGGKVCPKGECPWQVLLLVNGAQLCGGTLINTIWVVSAAHCFDYIKNWRNLIAVLGEHDLSEHDGDEQSRRVAQVIIPSTYVPGTTNHDIALLRLHQPVVLTDHVVPLCLPERTFSERTLAFVRFSLVSGWGQLLDRGATALELMVLNVPRLMTQDCLQQSRKVGDSPNITEYMFCAGYSDGSKDSCKGDSGGPHATHYRGTWYLTGIVSWGQGCATVGHFGVYTRVSQYIEWLQKLMRSEPRPGVLLRAPFP

SEQ ID NO: 22 - protein, 406 aa, Homo sapiens
  Factor VIIa variant K60aA
ANAFLEELRPGSLERECKEEQCSFEEAREIFKDAERTKLFWISYSDGDQCASSPCQNGGSCKDQLQSYICFCLPAFEGRNCETHKDDQLICVNENGGCEQYCSDHTGTKRSCRCHEGYSLLADGVSCTPTVEYPCGKIPILEKRNASKPQGRIVGGKVCPKGECPWQVLLLVNGAQLCGGTLINTIWVVSAAHCFDAIKNWRNLIAVLGEHDLSEHDGDEQSRRVAQVIIPSTYVPGTTNHDIALLRLHQPVVLTDHVVPLCLPERTFSERTLAFVRFSLVSGWGQLLDRGATALELMVLNVPRLMTQDCLQQSRKVGDSPNITEYMFCAGYSDGSKDSCKGDSGGPHATHYRGTWYLTGIVSWGQGCATVGHFGVYTRVSQYIEWLQKLMRSEPRPGVLLRAPFP

SEQ ID NO: 23 - protein, 406 aa, Homo sapiens
  Factor VIIa variant K60aE
ANAFLEELRPGSLERECKEEQCSFEEAREIFKDAERTKLFWISYSDGDQCASSPCQNGGSCKDQLQSYICFCLPAFEGRNCETHKDDQLICVNENGGCEQYCSDHTGTKRSCRCHEGYSLLADGVSCTPTVEYPCGKIPILEKRNASKPQGRIVGGKVCPKGECPWQVLLLVNGAQLCGGTLINTIWVVSAAHCFDEIKNWRNLIAVLGEHDLSEHDGDEQSRRVAQVIIPSTYVPGTTNHDIALLRLHQPVVLTDHVVPLCLPERTFSERTLAFVRFSLVSGWGQLLDRGATALELMVLNVPRLMTQDCLQQSRKVGDSPNITEYMFCAGYSDGSKDSCKGDSGGPHATHYRGTWYLTGIVSWGQGCATVGHFGVYTRVSQYIEWLQKLMRSEPRPGVLLRAPFP

SEQ ID NO: 24 - protein, 406 aa, Homo sapiens
  Factor VIIa variant K60aD
ANAFLEELRPGSLERECKEEQCSFEEAREIFKDAERTKLFWISYSDGDQCASSPCQNGGSCKDQLQSYICFCLPAFEGRNCETHKDDQLICVNENGGCEQYCSDHTGTKRSCRCHEGYSLLADGVSCTPTVEYPCGKIPILEKRNASKPQGRIVGGKVCPKGECPWQVLLLVNGAQLCGGTLINTIWVVSAAHCFDDIKNWRNLIAVLGEHDLSEHDGDEQSRRVAQVIIPSTYVPGTTNHDIALLRLHQPVVLTDHVVPLCLPERTFSERTLAFVRFSLVSGWGQLLDRGATALELMVLNVPRLMTQDCLQQSRKVGDSPNITEYMFCAGYSDGSKDSCKGDSGGPHATHYRGTWYLTGIVSWGQGCATVGHFGVYTRVSQYIEWLQKLMRSEPRPGVLLRAPFP

SEQ ID NO: 25 - protein, 406 aa, Homo sapiens
  Factor VIIa variant K60aL
ANAFLEELRPGSLERECKEEQCSFEEAREIFKDAERTKLFWISYSDGDQCASSPCQNGGSCKDQLQSYICFCLPAFEGRNCETHKDDQLICVNENGGCEQYCSDHTGTKRSCRCHEGYSLLADGVSCTPTVEYPCGKIPILEKRNASKPQGRIVGGKVCPKGECPWQVLLLVNGAQLCGGTLINTIWVVSAAHCFDLIKNWRNLIAVLGEHDLSEHDGDEQSRRVAQVIIPSTYVPGTTNHDIALLRLHQPVVLTDHVVPLCLPERTFSERTLAFVRFSLVSGWGQLLDRGATALELMVLNVPRLMTQDCLQQSRKVGDSPNITEYMFCAGYSDGSKDSCKGDSGGPHATHYRGTWYLTGIVSWGQGCATVGHFGVYTRVSQYIEWLQKLMRSEPRPGVLLRAPFP

SEQ ID NO: 26 - protein, 406 aa, Homo sapiens
  Factor VIIa variant K60aM
ANAFLEELRPGSLERECKEEQCSFEEAREIFKDAERTKLFWISYSDGDQCASSPCQNGGSCKDQLQSYICFCLPAFEGRNCETHKDDQLICVNENGGCEQYCSDHTGTKRSCRCHEGYSLLADGVSCTPTVEYPCGKIPILEKRNASKPQGRIVGGKVCPKGECPWQVLLLVNGAQLCGGTLINTIWVVSAAHCFDMIKNWRNLIAVLGEHDLSEHDGDEQSRRVAQVIIPSTYVPGTTNHDIALLRLHQPVVLTDHVVPLCLPERTFSERTLAFVRFSLVSGWGQLLDRGATALELMVLNVPRLMTQDCLQQSRKVGDSPNITEYMFCAGYSDGSKDSCKGDSGGPHATHYRGTWYLTGIVSWGQGCATVGHFGVYTRVSQYIEWLQKLMRSEPRPGVLLRAPFP

SEQ ID NO: 27 - protein, 406 aa, Homo sapiens
  Factor VIIa variant K60cA
ANAFLEELRPGSLERECKEEQCSFEEAREIFKDAERTKLFWISYSDGDQCASSPCQNGGSCKDQLQSYICFCLPAFEGRNCETHKDDQLICVNENGGCEQYCSDHTGTKRSCRCHEGYSLLADGVSCTPTVEYPCGKIPILEKRNASKPQGRIVGGKVCPKGECPWQVLLLVNGAQLCGGTLINTIWVVSAAHCFDKIANWRNLIAVLGEHDLSEHDGDEQSRRVAQVIIPSTYVPGTTNHDIALLRLHQPVVLTDHVVPLCLPERTFSERTLAFVRFSLVSGWGQLLDRGATALELMVLNVPRLMTQDCLQQSRKVGDSPNITEYMFCAGYSDGSKDSCKGDSGGPHATHYRGTWYLTGIVSWGQGCATVGHFGVYTRVSQYIEWLQKLMRSEPRPGVLLRAPFP

SEQ ID NO: 28 - protein, 406 aa, Homo sapiens
  Factor VIIa variant K60cD
ANAFLEELRPGSLERECKEEQCSFEEAREIFKDAERTKLFWISYSDGDQCASSPCQNGGSCKDQLQSYICFCLPAFEGRNCETHKDDQLICVNENGGCEQYCSDHTGTKRSCRCHEGYSLLADGVSCTPTVEYPCGKIPILEKRNASKPQGRIVGGKVCPKGECPWQVLLLVNGAQLCGGTLINTIWVVSAAHCFDKIDNWRNLIAVLGEHDLSEHDGDEQSRRVAQVIIPSTYVPGTTNHDIALLRLHQPVVLTDHVVPLCLPERTFSERTLAFVRFSLVSGWGQLLDRGATALELMVLNVPRLMTQDCLQQSRKVGDSPNITEYMFCAGYSDGSKDSCKGDSGGPHATHYRGTWYLTGIVSWGQGCATVGHFGVYTRVSQYIEWLQKLMRSEPRPGVLLRAPFP

SEQ ID NO: 29 - protein, 406 aa, Homo sapiens
  Factor VIIa variant K60cE
ANAFLEELRPGSLERECKEEQCSFEEAREIFKDAERTKLFWISYSDGDQCASSPCQNGGSCKDQLQSYICFCLPAFEGRNCETHKDDQLICVNENGGCEQYCSDHTGTKRSCRCHEGYSLLADGVSCTPTVEYPCGKIPILEKRNASKPQGRIVGGKVCPKGECPWQVLLLVNGAQLCGGTLINTIWVVSAAHCFDKIENWRNLIAVLGEHDLSEHDGDEQSRRVAQVIIPSTYVPGTTNHDIALLRLHQPVVLTDHVVPLCLPERTFSERTLAFVRFSLVSGWGQLLDRGATALELMVLNVPRLMTQDCLQQSRKVGDSPNITEYMFCAGYSDGSKDSCKGDSGGPHATHYRGTWYLTGIVSWGQGCATVGHFGVYTRVSQYIEWLQKLMRSEPRPGVLLRAPFP

SEQ ID NO: 30 - protein, 406 aa, Homo sapiens
  Factor VIIa variant T99A
ANAFLEELRPGSLERECKEEQCSFEEAREIFKDAERTKLFWISYSDGDQCASSPCQNGGSCKDQLQSYICFCLPAFEGRNCETHKDDQLICVNENGGCEQYCSDHTGTKRSCRCHEGYSLLADGVSCTPTVEYPCGKIPILEKRNASKPQGRIVGGKVCPKGECPWQVLLLVNGAQLCGGTLINTIWVVSAAHCFDKIKNWRNLIAVLGEHDLSEHDGDEQSRRVAQVIIPSTYVPGTANHDIALLRLHQPVVLTDHVVPLCLPERTFSERTLAFVRFSLVSGWGQLLDRGATALELMVLNVPRLMTQDCLQQSRKVGDSPNITEYMFCAGYSDGSKDSCKGDSGGPHATHYRGTWYLTGIVSWGQGCATVGHFGVYTRVSQYIEWLQKLMRSEPRPGVLLRAPFP

SEQ ID NO: 31 - protein, 406 aa, Homo sapiens
  Factor VIIa variant R147A
ANAFLEELRPGSLERECKEEQCSFEEAREIFKDAERTKLFWISYSDGDQCASSPCQNGGSCKDQLQSYICFCLPAFEGRNCETHKDDQLICVNENGGCEQYCSDHTGTKRSCRCHEGYSLLADGVSCTPTVEYPCGKIPILEKRNASKPQGRIVGGKVCPKGECPWQVLLLVNGAQLCGGTLINTIWVVSAAHCFDKIKNWRNLIAVLGEHDLSEHDGDEQSRRVAQVIIPSTYVPGTTNHDIALLRLHQPVVLTDHVVPLCLPERTFSERTLAFVRFSLVSGWGQLLDAGATALELMVLNVPRLMTQDCLQQSRKVGDSPNITEYMFCAGYSDGSKDSCKGDSGGPHATHYRGTWYLTGIVSWGQGCATVGHFGVYTRVSQYIEWLQKLMRSEPRPGVLLRAPFP

SEQ ID NO: 32 - protein, 406 aa, Homo sapiens
  Factor VIIa variant R147E
ANAFLEELRPGSLERECKEEQCSFEEAREIFKDAERTKLFWISYSDGDQCASSPCQNGGSCKDQLQSYICFCLPAFEGRNCETHKDDQLICVNENGGCEQYCSDHTGTKRSCRCHEGYSLLADGVSCTPTVEYPCGKIPILEKRNASKPQGRIVGGKVCPKGECPWQVLLLVNGAQLCGGTLINTIWVVSAAHCFDKIKNWRNLIAVLGEHDLSEHDGDEQSRRVAQVIIPSTYVPGTTNHDIALLRLHQPVVLTDHVVPLCLPERTFSERTLAFVRFSLVSGWGQLLDEGATALELMVLNVPRLMTQDCLQQSRKVGDSPNITEYMFCAGYSDGSKDSCKGDSGGPHATHYRGTWYLTGIVSWGQGCATVGHFGVYTRVSQYIEWLQKLMRSEPRPGVLLRAPFP

SEQ ID NO: 33 - protein, 406 aa, Homo sapiens
  Factor VIIa variant R147D
ANAFLEELRPGSLERECKEEQCSFEEAREIFKDAERTKLFWISYSDGDQCASSPCQNGGSCKDQLQSYICFCLPAFEGRNCETHKDDQLICVNENGGCEQYCSDHTGTKRSCRCHEGYSLLADGVSCTPTVEYPCGKIPILEKRNASKPQGRIVGGKVCPKGECPWQVLLLVNGAQLCGGTLINTIWVVSAAHCFDKIKNWRNLIAVLGEHDLSEHDGDEQSRRVAQVIIPSTYVPGTTNHDIALLRLHQPVVLTDHVVPLCLPERTFSERTLAFVRFSLVSGWGQLLDDGATALELMVLNVPRLMTQDCLQQSRKVGDSPNITEYMFCAGYSDGSKDSCKGDSGGPHATHYRGTWYLTGIVSWGQGCATVGHFGVYTRVSQYIEWLQKLMRSEPRPGVLLRAPFP

SEQ ID NO: 34 - protein, 406 aa, Homo sapiens
  Factor VIIa variant K192E
ANAFLEELRPGSLERECKEEQCSFEEAREIFKDAERTKLFWISYSDGDQCASSPCQNGGSCKDQLQSYICFCLPAFEGRNCETHKDDQLICVNENGGCEQYCSDHTGTKRSCRCHEGYSLLADGVSCTPTVEYPCGKIPILEKRNASKPQGRIVGGKVCPKGECPWQVLLLVNGAQLCGGTLINTIWVVSAAHCFDKIKNWRNLIAVLGEHDLSEHDGDEQSRRVAQVIIPSTYVPGTTNHDIALLRLHQPVVLTDHVVPLCLPERTFSERTLAFVRFSLVSGWGQLLDRGATALELMVLNVPRLMTQDCLQQSRKVGDSPNITEYMFCAGYSDGSKDSCEGDSGGPHATHYRGTWYLTGIVSWGQGCATVGHFGVYTRVSQYIEWLQKLMRSEPRPGVLLRAPFP

SEQ ID NO: 35 - protein, 406 aa, Homo sapiens
  Factor VIIa variant K192R
ANAFLEELRPGSLERECKEEQCSFEEAREIFKDAERTKLFWISYSDGDQCASSPCQNGGSCKDQLQSYICFCLPAFEGRNCETHKDDQLICVNENGGCEQYCSDHTGTKRSCRCHEGYSLLADGVSCTPTVEYPCGKIPILEKRNASKPQGRIVGGKVCPKGECPWQVLLLVNGAQLCGGTLINTIWVVSAAHCFDKIKNWRNLIAVLGEHDLSEHDGDEQSRRVAQVIIPSTYVPGTTNHDIALLRLHQPVVLTDHVVPLCLPERTFSERTLAFVRFSLVSGWGQLLDRGATALELMVLNVPRLMTQDCLQQSRKVGDSPNITEYMFCAGYSDGSKDSCRGDSGGPHATHYRGTWYLTGIVSWGQGCATVGHFGVYTRVSQYIEWLQKLMRSEPRPGVLLRAPFP

SEQ ID NO: 36 - protein, 406 aa, Homo sapiens
  Factor VIIa variant D60R/R147E
ANAFLEELRPGSLERECKEEQCSFEEAREIFKDAERTKLFWISYSDGDQCASSPCQNGGSCKDQLQSYICFCLPAFEGRNCETHKDDQLICVNENGGCEQYCSDHTGTKRSCRCHEGYSLLADGVSCTPTVEYPCGKIPILEKRNASKPQGRIVGGKVCPKGECPWQVLLLVNGAQLCGGTLINTIWVVSAAHCFRKIKNWRNLIAVLGEHDLSEHDGDEQSRRVAQVIIPSTYVPGTTNHDIALLRLHQPVVLTDHVVPLCLPERTFSERTLAFVRFSLVSGWGQLLDEGATALELMVLNVPRLMTQDCLQQSRKVGDSPNITEYMFCAGYSDGSKDSCKGDSGGPHATHYRGTWYLTGIVSWGQGCATVGHFGVYTRVSQYIEWLQKLMRSEPRPGVLLRAPFP

SEQ ID NO: 37 - protein, 406 aa, Homo sapiens
  Factor VIIa variant D60K/R147E
ANAFLEELRPGSLERECKEEQCSFEEAREIFKDAERTKLFWISYSDGDQCASSPCQNGGSCKDQLQSYICFCLPAFEGRNCETHKDDQLICVNENGGCEQYCSDHTGTKRSCRCHEGYSLLADGVSCTPTVEYPCGKIPILEKRNASKPQGRIVGGKVCPKGECPWQVLLLVNGAQLCGGTLINTIWVVSAAHCFKKIKNWRNLIAVLGEHDLSEHDGDEQSRRVAQVIIPSTYVPGTTNHDIALLRLHQPVVLTDHVVPLCLPERTFSERTLAFVRFSLVSGWGQLLDEGATALELMVLNVPRLMTQDCLQQSRKVGDSPNITEYMFCAGYSDGSKDSCKGDSGGPHATHYRGTWYLTGIVSWGQGCATVGHFGVYTRVSQYIEWLQKLMRSEPRPGVLLRAPFP

SEQ ID NO: 38 - protein, 406 aa, Homo sapiens
  Factor VIIa variant D60R/R147D
ANAFLEELRPGSLERECKEEQCSFEEAREIFKDAERTKLFWISYSDGDQCASSPCQNGGSCKDQLQSYICFCLPAFEGRNCETHKDDQLICVNENGGCEQYCSDHTGTKRSCRCHEGYSLLADGVSCTPTVEYPCGKIPILEKRNASKPQGRIVGGKVCPKGECPWQVLLLVNGAQLCGGTLINTIWVVSAAHCFRKIKNWRNLIAVLGEHDLSEHDGDEQSRRVAQVIIPSTYVPGTTNHDIALLRLHQPVVLTDHVVPLCLPERTFSERTLAFVRFSLVSGWGQLLDDGATALELMVLNVPRLMTQDCLQQSRKVGDSPNITEYMFCAGYSDGSKDSCKGDSGGPHATHYRGTWYLTGIVSWGQGCATVGHFGVYTRVSQYIEWLQKLMRSEPRPGVLLRAPFP

SEQ ID NO: 39 - protein, 406 aa, Homo sapiens
  Factor VIIa variant D60R/K60aE/K60cE
ANAFLEELRPGSLERECKEEQCSFEEAREIFKDAERTKLFWISYSDGDQCASSPCQNGGSCKDQLQSYICFCLPAFEGRNCETHKDDQLICVNENGGCEQYCSDHTGTKRSCRCHEGYSLLADGVSCTPTVEYPCGKIPILEKRNASKPQGRIVGGKVCPKGECPWQVLLLVNGAQLCGGTLINTIWVVSAAHCFREIENWRNLIAVLGEHDLSEHDGDEQSRRVAQVIIPSTYVPGTTNHDIALLRLHQPVVLTDHVVPLCLPERTFSERTLAFVRFSLVSGWGQLLDRGATALELMVLNVPRLMTQDCLQQSRKVGDSPNITEYMFCAGYSDGSKDSCKGDSGGPHATHYRGTWYLTGIVSWGQGCATVGHFGVYTRVSQYIEWLQKLMRSEPRPGVLLRAPFP

SEQ ID NO: 40 - protein, 406 aa, Homo sapiens; identical to SEQ ID NO: 18
  Factor VIIa variant D60K/K60aE/K60cE

SEQ ID NO: 41 - protein, 406 aa, Homo sapiens
  Factor VIIa variant D60R/K60aE/K60cE/R147E
ANAFLEELRPGSLERECKEEQCSFEEAREIFKDAERTKLFWISYSDGDQCASSPCQNGGSCKDQLQSYICFCLPAFEGRNCETHKDDQLICVNENGGCEQYCSDHTGTKRSCRCHEGYSLLADGVSCTPTVEYPCGKIPILEKRNASKPQGRIVGGKVCPKGECPWQVLLLVNGAQLCGGTLINTIWVVSAAHCFREIENWRNLIAVLGEHDLSEHDGDEQSRRVAQVIIPSTYVPGTTNHDIALLRLHQPVVLTDHVVPLCLPERTFSERTLAFVRFSLVSGWGQLLDEGATALELMVLNVPRLMTQDCLQQSRKVGDSPNITEYMFCAGYSDGSKDSCKGDSGGPHATHYRGTWYLTGIVSWGQGCATVGHFGVYTRVSQYIEWLQKLMRSEPRPGVLLRAPFP

SEQ ID NO: 42 - protein, 406 aa, Homo sapiens
  Factor VIIa variant D60R/K60aM/K60cE
ANAFLEELRPGSLERECKEEQCSFEEAREIFKDAERTKLFWISYSDGDQCASSPCQNGGSCKDQLQSYICFCLPAFEGRNCETHKDDQLICVNENGGCEQYCSDHTGTKRSCRCHEGYSLLADGVSCTPTVEYPCGKIPILEKRNASKPQGRIVGGKVCPKGECPWQVLLLVNGAQLCGGTLINTIWVVSAAHCFRMIENWRNLIAVLGEHDLSEHDGDEQSRRVAQVIIPSTYVPGTTNHDIALLRLHQPVVLTDHVVPLCLPERTFSERTLAFVRFSLVSGWGQLLDRGATALELMVLNVPRLMTQDCLQQSRKVGDSPNITEYMFCAGYSDGSKDSCKGDSGGPHATHYRGTWYLTGIVSWGQGCATVGHFGVYTRVSQYIEWLQKLMRSEPRPGVLLRAPFP

SEQ ID NO: 43 - protein, 406 aa, Homo sapiens
  Factor VIIa variant D60R/K60aM/K60cE/R147E
ANAFLEELRPGSLERECKEEQCSFEEAREIFKDAERTKLFWISYSDGDQCASSPCQNGGSCKDQLQSYICFCLPAFEGRNCETHKDDQLICVNENGGCEQYCSDHTGTKRSCRCHEGYSLLADGVSCTPTVEYPCGKIPILEKRNASKPQGRIVGGKVCPKGECPWQVLLLVNGAQLCGGTLINTIWVVSAAHCFRMIENWRNLIAVLGEHDLSEHDGDEQSRRVAQVIIPSTYVPGTTNHDIALLRLHQPVVLTDHVVPLCLPERTFSERTLAFVRFSLVSGWGQLLDEGATALELMVLNVPRLMTQDCLQQSRKVGDSPNITEYMFCAGYSDGSKDSCKGDSGGPHATHYRGTWYLTGIVSWGQGCATVGHFGVYTRVSQYIEWLQKLMRSEPRPGVLLRAPFP

SEQ ID NO: 44 - protein, 466 aa, Homo sapiens
  FVII variant L13P
MVSQALRLLCLLPGLQGCLAAGGVAKASGGETRDMPWKPGPHRVFVTQEEAHGVLHRRRRANAFLEELRPGSLERECKEEQCSFEEAREIFKDAERTKLFWISYSDGDQCASSPCQNGGSCKDQLQSYICFCLPAFEGRNCETHKDDQLICVNENGGCEQYCSDHTGTKRSCRCHEGYSLLADGVSCTPTVEYPCGKIPILEKRNASKPQGRIVGGKVCPKGECPWQVLLLVNGAQLCGGTLINTIWVVSAAHCFDKIKNWRNLIAVLGEHDLSEHDGDEQSRRVAQVIIPSTYVPGTTNHDIALLRLHQPVVLTDHVVPLCLPERTFSERTLAFVRFSLVSGWGQLLDRGATALELMVLNVPRLMTQDCLQQSRKVGDSPNITEYMFCAGYSDGSKDSCKGDSGGPHATHYRGTWYLTGIVSWGQGCATVGHFGVYTRVSQYIEWLQKLMRSEPRPGVLLRAPFP

SEQ ID NO: 45 - protein, 466 aa, Homo sapiens
  FVII variant (precursor F64L)
MVSQALRLLCLLLGLQGCLAAGGVAKASGGETRDMPWKPGPHRVFVTQEEAHGVLHRRRRANALLEELRPGSLERECKEEQCSFEEAREIFKDAERTKLFWISYSDGDQCASSPCQNGGSCKDQLQSYICFCLPAFEGRNCETHKDDQLICVNENGGCEQYCSDHTGTKRSCRCHEGYSLLADGVSCTPTVEYPCGKIPILEKRNASKPQGRIVGGKVCPKGECPWQVLLLVNGAQLCGGTLINTIWVVSAAHCFDKIKNWRNLIAVLGEHDLSEHDGDEQSRRVAQVIIPSTYVPGTTNHDIALLRLHQPVVLTDHVVPLCLPERTFSERTLAFVRFSLVSGWGQLLDRGATALELMVLNVPRLMTQDCLQQSRKVGDSPNITEYMFCAGYSDGSKDSCKGDSGGPHATHYRGTWYLTGIVSWGQGCATVGHFGVYTRVSQYIEWLQKLMRSEPRPGVLLRAPFP

SEQ ID NO: 46 - protein, 466 aa, Homo sapiens
  FVII variant (precursor L73Q)
MVSQALRLLCLLLGLQGCLAAGGVAKASGGETRDMPWKPGPHRVFVTQEEAHGVLHRRRRANAFLEELRPGSQERECKEEQCSFEEAREIFKDAERTKLFWISYSDGDQCASSPCQNGGSCKDQLQSYICFCLPAFEGRNCETHKDDQLICVNENGGCEQYCSDHTGTKRSCRCHEGYSLLADGVSCTPTVEYPCGKIPILEKRNASKPQGRIVGGKVCPKGECPWQVLLLVNGAQLCGGTLINTIWVVSAAHCFDKIKNWRNLIAVLGEHDLSEHDGDEQSRRVAQVIIPSTYVPGTTNHDIALLRLHQPVVLTDHVVPLCLPERTFSERTLAFVRFSLVSGWGQLLDRGATALELMVLNVPRLMTQDCLQQSRKVGDSPNITEYMFCAGYSDGSKDSCKGDSGGPHATHYRGTWYLTGIVSWGQGCATVGHFGVYTRVSQYIEWLQKLMRSEPRPGVLLRAPFP

SEQ ID NO: 47 - protein, 466 aa, Homo sapiens
  FVII variant (precursor E79Q)
MVSQALRLLCLLLGLQGCLAAGGVAKASGGETRDMPWKPGPHRVFVTQEEAHGVLHRRRRANAFLEELRPGSLERECKQEQCSFEEAREIFKDAERTKLFWISYSDGDQCASSPCQNGGSCKDQLQSYICFCLPAFEGRNCETHKDDQLICVNENGGCEQYCSDHTGTKRSCRCHEGYSLLADGVSCTPTVEYPCGKIPILEKRNASKPQGRIVGGKVCPKGECPWQVLLLVNGAQLCGGTLINTIWVVSAAHCFDKIKNWRNLIAVLGEHDLSEHDGDEQSRRVAQVIIPSTYVPGTTNHDIALLRLHQPVVLTDHVVPLCLPERTFSERTLAFVRFSLVSGWGQLLDRGATALELMVLNVPRLMTQDCLQQSRKVGDSPNITEYMFCAGYSDGSKDSCKGDSGGPHATHYRGTWYLTGIVSWGQGCATVGHFGVYTRVSQYIEWLQKLMRSEPRPGVLLRAPFP

SEQ ID NO: 48 - protein, 466 aa, Homo sapiens
  FVII variant (precursor S120P)
MVSQALRLLCLLLGLQGCLAAGGVAKASGGETRDMPWKPGPHRVFVTQEEAHGVLHRRRRANAFLEELRPGSLERECKEEQCSFEEAREIFKDAERTKLFWISYSDGDQCASSPCQNGGPCKDQLQSYICFCLPAFEGRNCETHKDDQLICVNENGGCEQYCSDHTGTKRSCRCHEGYSLLADGVSCTPTVEYPCGKIPILEKRNASKPQGRIVGGKVCPKGECPWQVLLLVNGAQLCGGTLINTIWVVSAAHCFDKIKNWRNLIAVLGEHDLSEHDGDEQSRRVAQVIIPSTYVPGTTNHDIALLRLHQPVVLTDHVVPLCLPERTFSERTLAFVRFSLVSGWGQLLDRGATALELMVLNVPRLMTQDCLQQSRKVGDSPNITEYMFCAGYSDGSKDSCKGDSGGPHATHYRGTWYLTGIVSWGQGCATVGHFGVYTRVSQYIEWLQKLMRSEPRPGVLLRAPFP

SEQ ID NO: 49 - protein, 466 aa, Homo sapiens
  FVII variant (precursor C121F)
MVSQALRLLCLLLGLQGCLAAGGVAKASGGETRDMPWKPGPHRVFVTQEEAHGVLHRRRRANAFLEELRPGSLERECKEEQCSFEEAREIFKDAERTKLFWISYSDGDQCASSPCQNGGSFKDQLQSYICFCLPAFEGRNCETHKDDQLICVNENGGCEQYCSDHTGTKRSCRCHEGYSLLADGVSCTPTVEYPCGKIPILEKRNASKPQGRIVGGKVCPKGECPWQVLLLVNGAQLCGGTLINTIWVVSAAHCFDKIKNWRNLIAVLGEHDLSEHDGDEQSRRVAQVIIPSTYVPGTTNHDIALLRLHQPVVLTDHVVPLCLPERTFSERTLAFVRFSLVSGWGQLLDRGATALELMVLNVPRLMTQDCLQQSRKVGDSPNITEYMFCAGYSDGSKDSCKGDSGGPHATHYRGTWYLTGIVSWGQGCATVGHFGVYTRVSQYIEWLQKLMRSEPRPGVLLRAPFP

SEQ ID NO: 50 - protein, 466 aa, Hmo sapiens
  FVII variant (precursor L125P)
MVSQALRLLCLLLGLQGCLAAGGVAKASGGETRDMPWKPGPHRVFVTQEEAHGVLHRRRRANAFLEELRPGSLERECKEEQCSFEEAREIFKDAERTKLFWISYSDGDQCASSPCQNGGSCKDQPQSYICFCLPAFEGRNCETHKDDQLICVNENGGCEQYCSDHTGTKRSCRCHEGYSLLADGVSCTPTVEYPCGKIPILEKRNASKPQGRIVGGKVCPKGECPWQVLLLVNGAQLCGGTLINTIWVVSAAHCFDKIKNWRNLIAVLGEHDLSEHDGDEQSRRVAQVIIPSTYVPGTTNHDIALLRLHQPVVLTDHVVPLCLPERTFSERTLAFVRFSLVSGWGQLLDRGATALELMVLNVPRLMTQDCLQQSRKVGDSPNITEYMFCAGYSDGSKDSCKGDSGGPHATHYRGTWYLTGIVSWGQGCATVGHFGVYTRVSQYIEWLQKLMRSEPRPGVLLRAPFP

SEQ ID NO: 51 - protein, 466 aa, Homo sapiens
  FVII variant (precursorY128C)
MVSQALRLLCLLLGLQGCLAAGGVAKASGGETRDMPWKPGPHRVFVTQEEAHGVLHRRRRANAFLEELRPGSLERECKEEQCSFEEAREIFKDAERTKLFWISYSDGDQCASSPCQNGGSCKDQLQSCICFCLPAFEGRNCETHKDDQLICVNENGGCEQYCSDHTGTKRSCRCHEGYSLLADGVSCTPTVEYPCGKIPILEKRNASKPQGRIVGGKVCPKGECPWQVLLLVNGAQLCGGTLINTIWVVSAAHCFDKIKNWRNLIAVLGEHDLSEHDGDEQSRRVAQVIIPSTYVPGTTNHDIALLRLHQPVVLTDHVVPLCLPERTFSERTLAFVRFSLVSGWGQLLDRGATALELMVLNVPRLMTQDCLQQSRKVGDSPNITEYMFCAGYSDGSKDSCKGDSGGPHATHYRGTWYLTGIVSWGQGCATVGHFGVYTRVSQYIEWLQKLMRSEPRPGVLLRAPFP

SEQ ID NO: 52 - protein, 466 aa, Homo sapiens
  FVII variant (precursor R139K)
MVSQALRLLCLLLGLQGCLAAGGVAKASGGETRDMPWKPGPHRVFVTQEEAHGVLHRRRRANAFLEELRPGSLERECKEEQCSFEEAREIFKDAERTKLFWISYSDGDQCASSPCQNGGSCKDQLQSYICFCLPAFEGKNCETHKDDQLICVNENGGCEQYCSDHTGTKRSCRCHEGYSLLADGVSCTPTVEYPCGKIPILEKRNASKPQGRIVGGKVCPKGECPWQVLLLVNGAQLCGGTLINTIWVVSAAHCFDKIKNWRNLIAVLGEHDLSEHDGDEQSRRVAQVIIPSTYVPGTTNHDIALLRLHQPVVLTDHVVPLCLPERTFSERTLAFVRFSLVSGWGQLLDRGATALELMVLNVPRLMTQDCLQQSRKVGDSPNITEYMFCAGYSDGSKDSCKGDSGGPHATHYRGTWYLTGIVSWGQGCATVGHFGVYTRVSQYIEWLQKLMRSEPRPGVLLRAPFP

SEQ ID NO: 53 - protein, 466 aa, Homo sapiens
  FVII variant (precursor R139Q)
MVSQALRLLCLLLGLQGCLAAGGVAKASGGETRDMPWKPGPHRVFVTQEEAHGVLHRRRRANAFLEELRPGSLERECKEEQCSFEEAREIFKDAERTKLFWISYSDGDQCASSPCQNGGSCKDQLQSYICFCLPAFEGQNCETHKDDQLICVNENGGCEQYCSDHTGTKRSCRCHEGYSLLADGVSCTPTVEYPCGKIPILEKRNASKPQGRIVGGKVCPKGECPWQVLLLVNGAQLCGGTLINTIWVVSAAHCFDKIKNWRNLIAVLGEHDLSEHDGDEQSRRVAQVIIPSTYVPGTTNHDIALLRLHQPVVLTDHVVPLCLPERTFSERTLAFVRFSLVSGWGQLLDRGATALELMVLNVPRLMTQDCLQQSRKVGDSPNITEYMFCAGYSDGSKDSCKGDSGGPHATHYRGTWYLTGIVSWGQGCATVGHFGVYTRVSQYIEWLQKLMRSEPRPGVLLRAPFP

SEQ ID NO: 54 - protein, 466 aa, Homo sapiens
  FVII variant (precursor R139W)
MVSQALRLLCLLLGLQGCLAAGGVAKASGGETRDMPWKPGPHRVFVTQEEAHGVLHRRRRANAFLEELRPGSLERECKEEQCSFEEAREIFKDAERTKLFWISYSDGDQCASSPCQNGGSCKDQLQSYICFCLPAFEGWNCETHKDDQLICVNENGGCEQYCSDHTGTKRSCRCHEGYSLLADGVSCTPTVEYPCGKIPILEKRNASKPQGRIVGGKVCPKGECPWQVLLLVNGAQLCGGTLINTIWVVSAAHCFDKIKNWRNLIAVLGEHDLSEHDGDEQSRRVAQVIIPSTYVPGTTNHDIALLRLHQPVVLTDHVVPLCLPERTFSERTLAFVRFSLVSGWGQLLDRGATALELMVLNVPRLMTQDCLQQSRKVGDSPNITEYMFCAGYSDGSKDSCKGDSGGPHATHYRGTWYLTGIVSWGQGCATVGHFGVYTRVSQYIEWLQKLMRSEPRPGVLLRAPFP

SEQ ID NO: 55 - protein, 466 aa, Homo sapiens
  FVII variant (precursor C151S)
MVSQALRLLCLLLGLQGCLAAGGVAKASGGETRDMPWKPGPHRVFVTQEEAHGVLHRRRRANAFLEELRPGSLERECKEEQCSFEEAREIFKDAERTKLFWISYSDGDQCASSPCQNGGSCKDQLQSYICFCLPAFEGRNCETHKDDQLISVNENGGCEQYCSDHTGTKRSCRCHEGYSLLADGVSCTPTVEYPCGKIPILEKRNASKPQGRIVGGKVCPKGECPWQVLLLVNGAQLCGGTLINTIWVVSAAHCFDKIKNWRNLIAVLGEHDLSEHDGDEQSRRVAQVIIPSTYVPGTTNHDIALLRLHQPVVLTDHVVPLCLPERTFSERTLAFVRFSLVSGWGQLLDRGATALELMVLNVPRLMTQDCLQQSRKVGDSPNITEYMFCAGYSDGSKDSCKGDSGGPHATHYRGTWYLTGIVSWGQGCATVGHFGVYTRVSQYIEWLQKLMRSEPRPGVLLRAPFP

SEQ ID NO: 56 - protein, 466 aa, Homo sapiens
  FVII variant (precursor E154K)
MVSQALRLLCLLLGLQGCLAAGGVAKASGGETRDMPWKPGPHRVFVTQEEAHGVLHRRRRANAFLEELRPGSLERECKEEQCSFEEAREIFKDAERTKLFWISYSDGDQCASSPCQNGGSCKDQLQSYICFCLPAFEGRNCETHKDDQLICVNKNGGCEQYCSDHTGTKRSCRCHEGYSLLADGVSCTPTVEYPCGKIPILEKRNASKPQGRIVGGKVCPKGECPWQVLLLVNGAQLCGGTLINTIWVVSAAHCFDKIKNWRNLIAVLGEHDLSEHDGDEQSRRVAQVIIPSTYVPGTTNHDIALLRLHQPVVLTDHVVPLCLPERTFSERTLAFVRFSLVSGWGQLLDRGATALELMVLNVPRLMTQDCLQQSRKVGDSPNITEYMFCAGYSDGSKDSCKGDSGGPHATHYRGTWYLTGIVSWGQGCATVGHFGVYTRVSQYIEWLQKLMRSEPRPGVLLRAPFP

SEQ ID NO: 57 - protein, 466 aa, Homo sapiens
  FVII variant (precursor G157C)
MVSQALRLLCLLLGLQGCLAAGGVAKASGGETRDMPWKPGPHRVFVTQEEAHGVLHRRRRANAFLEELRPGSLERECKEEQCSFEEAREIFKDAERTKLFWISYSDGDQCASSPCQNGGSCKDQLQSYICFCLPAFEGRNCETHKDDQLICVNENGCCEQYCSDHTGTKRSCRCHEGYSLLADGVSCTPTVEYPCGKIPILEKRNASKPQGRIVGGKVCPKGECPWQVLLLVNGAQLCGGTLINTIWVVSAAHCFDKIKNWRNLIAVLGEHDLSEHDGDEQSRRVAQVIIPSTYVPGTTNHDIALLRLHQPVVLTDHVVPLCLPERTFSERTLAFVRFSLVSGWGQLLDRGATALELMVLNVPRLMTQDCLQQSRKVGDSPNITEYMFCAGYSDGSKDSCKGDSGGPHATHYRGTWYLTGIVSWGQGCATVGHFGVYTRVSQYIEWLQKLMRSEPRPGVLLRAPFP

SEQ ID NO: 58 - protein, 466 aa, Homo sapiens
  FVII variant (precursorG157S)
MVSQALRLLCLLLGLQGCLAAGGVAKASGGETRDMPWKPGPHRVFVTQEEAHGVLHRRRRANAFLEELRPGSLERECKEEQCSFEEAREIFKDAERTKLFWISYSDGDQCASSPCQNGGSCKDQLQSYICFCLPAFEGRNCETHKDDQLICVNENGSCEQYCSDHTGTKRSCRCHEGYSLLADGVSCTPTVEYPCGKIPILEKRNASKPQGRIVGGKVCPKGECPWQVLLLVNGAQLCGGTLINTIWVVSAAHCFDKIKNWRNLIAVLGEHDLSEHDGDEQSRRVAQVIIPSTYVPGTTNHDIALLRLHQPVVLTDHVVPLCLPERTFSERTLAFVRFSLVSGWGQLLDRGATALELMVLNVPRLMTQDCLQQSRKVGDSPNITEYMFCAGYSDGSKDSCKGDSGGPHATHYRGTWYLTGIVSWGQGCATVGHFGVYTRVSQYIEWLQKLMRSEPRPGVLLRAPFP

SEQ ID NO: 59 - protein, 466 aa, Homo sapiens
  FVII variant (precursorG157V)
MVSQALRLLCLLLGLQGCLAAGGVAKASGGETRDMPWKPGPHRVFVTQEEAHGVLHRRRRANAFLEELRPGSLERECKEEQCSFEEAREIFKDAERTKLFWISYSDGDQCASSPCQNGGSCKDQLQSYICFCLPAFEGRNCETHKDDQLICVNENGVCEQYCSDHTGTKRSCRCHEGYSLLADGVSCTPTVEYPCGKIPILEKRNASKPQGRIVGGKVCPKGECPWQVLLLVNGAQLCGGTLINTIWVVSAAHCFDKIKNWRNLIAVLGEHDLSEHDGDEQSRRVAQVIIPSTYVPGTTNHDIALLRLHQPVVLTDHVVPLCLPERTFSERTLAFVRFSLVSGWGQLLDRGATALELMVLNVPRLMTQDCLQQSRKVGDSPNITEYMFCAGYSDGSKDSCKGDSGGPHATHYRGTWYLTGIVSWGQGCATVGHFGVYTRVSQYIEWLQKLMRSEPRPGVLLRAPFP

SEQ ID NO: 60 - protein, 466 aa, Homo sapiens
  FVII variant (precursor Q160R)
MVSQALRLLCLLLGLQGCLAAGGVAKASGGETRDMPWKPGPHRVFVTQEEAHGVLHRRRRANAFLEELRPGSLERECKEEQCSFEEAREIFKDAERTKLFWISYSDGDQCASSPCQNGGSCKDQLQSYICFCLPAFEGRNCETHKDDQLICVNENGGCERYCSDHTGTKRSCRCHEGYSLLADGVSCTPTVEYPCGKIPILEKRNASKPQGRIVGGKVCPKGECPWQVLLLVNGAQLCGGTLINTIWVVSAAHCFDKIKNWRNLIAVLGEHDLSEHDGDEQSRRVAQVIIPSTYVPGTTNHDIALLRLHQPVVLTDHVVPLCLPERTFSERTLAFVRFSLVSGWGQLLDRGATALELMVLNVPRLMTQDCLQQSRKVGDSPNITEYMFCAGYSDGSKDSCKGDSGGPHATHYRGTWYLTGIVSWGQGCATVGHFGVYTRVSQYIEWLQKLMRSEPRPGVLLRAPFP

SEQ ID NO: 61 - protein, 466 aa, Homo sapiens
  FVII variant (precursor P194T)
MVSQALRLLCLLLGLQGCLAAGGVAKASGGETRDMPWKPGPHRVFVTQEEAHGVLHRRRRANAFLEELRPGSLERECKEEQCSFEEAREIFKDAERTKLFWISYSDGDQCASSPCQNGGSCKDQLQSYICFCLPAFEGRNCETHKDDQLICVNENGGCEQYCSDHTGTKRSCRCHEGYSLLADGVSCTPTVEYTCGKIPILEKRNASKPQGRIVGGKVCPKGECPWQVLLLVNGAQLCGGTLINTIWVVSAAHCFDKIKNWRNLIAVLGEHDLSEHDGDEQSRRVAQVIIPSTYVPGTTNHDIALLRLHQPVVLTDHVVPLCLPERTFSERTLAFVRFSLVSGWGQLLDRGATALELMVLNVPRLMTQDCLQQSRKVGDSPNITEYMFCAGYSDGSKDSCKGDSGGPHATHYRGTWYLTGIVSWGQGCATVGHFGVYTRVSQYIEWLQKLMRSEPRPGVLLRAPFP

SEQ ID NO: 62 - protein, 466 aa, Homo sapiens
  FVII variant (precursor C195R)
MVSQALRLLCLLLGLQGCLAAGGVAKASGGETRDMPWKPGPHRVFVTQEEAHGVLHRRRRANAFLEELRPGSLERECKEEQCSFEEAREIFKDAERTKLFWISYSDGDQCASSPCQNGGSCKDQLQSYICFCLPAFEGRNCETHKDDQLICVNENGGCEQYCSDHTGTKRSCRCHEGYSLLADGVSCTPTVEYPRGKIPILEKRNASKPQGRIVGGKVCPKGECPWQVLLLVNGAQLCGGTLINTIWVVSAAHCFDKIKNWRNLIAVLGEHDLSEHDGDEQSRRVAQVIIPSTYVPGTTNHDIALLRLHQPVVLTDHVVPLCLPERTFSERTLAFVRFSLVSGWGQLLDRGATALELMVLNVPRLMTQDCLQQSRKVGDSPNITEYMFCAGYSDGSKDSCKGDSGGPHATHYRGTWYLTGIVSWGQGCATVGHFGVYTRVSQYIEWLQKLMRSEPRPGVLLRAPFP

SEQ ID NO: 63 - protein, 466 aa, Homo sapiens
  FVII variant (precursor K197E)
MVSQALRLLCLLLGLQGCLAAGGVAKASGGETRDMPWKPGPHRVFVTQEEAHGVLHRRRRANAFLEELRPGSLERECKEEQCSFEEAREIFKDAERTKLFWISYSDGDQCASSPCQNGGSCKDQLQSYICFCLPAFEGRNCETHKDDQLICVNENGGCEQYCSDHTGTKRSCRCHEGYSLLADGVSCTPTVEYPCGEIPILEKRNASKPQGRIVGGKVCPKGECPWQVLLLVNGAQLCGGTLINTIWVVSAAHCFDKIKNWRNLIAVLGEHDLSEHDGDEQSRRVAQVIIPSTYVPGTTNHDIALLRLHQPVVLTDHVVPLCLPERTFSERTLAFVRFSLVSGWGQLLDRGATALELMVLNVPRLMTQDCLQQSRKVGDSPNITEYMFCAGYSDGSKDSCKGDSGGPHATHYRGTWYLTGIVSWGQGCATVGHFGVYTRVSQYIEWLQKLMRSEPRPGVLLRAPFP

SEQ ID NO: 64 - protein, 466 aa, Homo sapiens
  FVII variant (precursor R212Q)
MVSQALRLLCLLLGLQGCLAAGGVAKASGGETRDMPWKPGPHRVFVTQEEAHGVLHRRRRANAFLEELRPGSLERECKEEQCSFEEAREIFKDAERTKLFWISYSDGDQCASSPCQNGGSCKDQLQSYICFCLPAFEGRNCETHKDDQLICVNENGGCEQYCSDHTGTKRSCRCHEGYSLLADGVSCTPTVEYPCGKIPILEKRNASKPQGQIVGGKVCPKGECPWQVLLLVNGAQLCGGTLINTIWVVSAAHCFDKIKNWRNLIAVLGEHDLSEHDGDEQSRRVAQVIIPSTYVPGTTNHDIALLRLHQPVVLTDHVVPLCLPERTFSERTLAFVRFSLVSGWGQLLDRGATALELMVLNVPRLMTQDCLQQSRKVGDSPNITEYMFCAGYSDGSKDSCKGDSGGPHATHYRGTWYLTGIVSWGQGCATVGHFGVYTRVSQYIEWLQKLMRSEPRPGVLLRAPFP

SEQ ID NO: 65 - protein, 466 aa, Homo sapiens
  FVII variant (precursor G216D)
MVSQALRLLCLLLGLQGCLAAGGVAKASGGETRDMPWKPGPHRVFVTQEEAHGVLHRRRRANAFLEELRPGSLERECKEEQCSFEEAREIFKDAERTKLFWISYSDGDQCASSPCQNGGSCKDQLQSYICFCLPAFEGRNCETHKDDQLICVNENGGCEQYCSDHTGTKRSCRCHEGYSLLADGVSCTPTVEYPCGKIPILEKRNASKPQGRIVGDKVCPKGECPWQVLLLVNGAQLCGGTLINTIWVVSAAHCFDKIKNWRNLIAVLGEHDLSEHDGDEQSRRVAQVIIPSTYVPGTTNHDIALLRLHQPVVLTDHVVPLCLPERTFSERTLAFVRFSLVSGWGQLLDRGATALELMVLNVPRLMTQDCLQQSRKVGDSPNITEYMFCAGYSDGSKDSCKGDSGGPHATHYRGTWYLTGIVSWGQGCATVGHFGVYTRVSQYIEWLQKLMRSEPRPGVLLRAPFP

SEQ ID NO: 66 - protein, 466 aa, Homo sapiens
  FVII variant (precursor C238Y)
MVSQALRLLCLLLGLQGCLAAGGVAKASGGETRDMPWKPGPHRVFVTQEEAHGVLHRRRRANAFLEELRPGSLERECKEEQCSFEEAREIFKDAERTKLFWISYSDGDQCASSPCQNGGSCKDQLQSYICFCLPAFEGRNCETHKDDQLICVNENGGCEQYCSDHTGTKRSCRCHEGYSLLADGVSCTPTVEYPCGKIPILEKRNASKPQGRIVGGKVCPKGECPWQVLLLVNGAQLYGGTLINTIWVVSAAHCFDKIKNWRNLIAVLGEHDLSEHDGDEQSRRVAQVIIPSTYVPGTTNHDIALLRLHQPVVLTDHVVPLCLPERTFSERTLAFVRFSLVSGWGQLLDRGATALELMVLNVPRLMTQDCLQQSRKVGDSPNITEYMFCAGYSDGSKDSCKGDSGGPHATHYRGTWYLTGIVSWGQGCATVGHFGVYTRVSQYIEWLQKLMRSEPRPGVLLRAPFP

SEQ ID NO: 67 - protein, 466 aa, Homo sapiens
  FVII variant (precursor T241N)
MVSQALRLLCLLLGLQGCLAAGGVAKASGGETRDMPWKPGPHRVFVTQEEAHGVLHRRRRANAFLEELRPGSLERECKEEQCSFEEAREIFKDAERTKLFWISYSDGDQCASSPCQNGGSCKDQLQSYICFCLPAFEGRNCETHKDDQLICVNENGGCEQYCSDHTGTKRSCRCHEGYSLLADGVSCTPTVEYPCGKIPILEKRNASKPQGRIVGGKVCPKGECPWQVLLLVNGAQLCGGNLINTIWVVSAAHCFDKIKNWRNLIAVLGEHDLSEHDGDEQSRRVAQVIIPSTYVPGTTNHDIALLRLHQPVVLTDHVVPLCLPERTFSERTLAFVRFSLVSGWGQLLDRGATALELMVLNVPRLMTQDCLQQSRKVGDSPNITEYMFCAGYSDGSKDSCKGDSGGPHATHYRGTWYLTGIVSWGQGCATVGHFGVYTRVSQYIEWLQKLMRSEPRPGVLLRAPFP

SEQ ID NO: 68 - protein, 466 aa, Homo sapiens
  FVII variant (precursor C254Y)
MVSQALRLLCLLLGLQGCLAAGGVAKASGGETRDMPWKPGPHRVFVTQEEAHGVLHRRRRANAFLEELRPGSLERECKEEQCSFEEAREIFKDAERTKLFWISYSDGDQCASSPCQNGGSCKDQLQSYICFCLPAFEGRNCETHKDDQLICVNENGGCEQYCSDHTGTKRSCRCHEGYSLLADGVSCTPTVEYPCGKIPILEKRNASKPQGRIVGGKVCPKGECPWQVLLLVNGAQLCGGTLINTIWVVSAAHYFDKIKNWRNLIAVLGEHDLSEHDGDEQSRRVAQVIIPSTYVPGTTNHDIALLRLHQPVVLTDHVVPLCLPERTFSERTLAFVRFSLVSGWGQLLDRGATALELMVLNVPRLMTQDCLQQSRKVGDSPNITEYMFCAGYSDGSKDSCKGDSGGPHATHYRGTWYLTGIVSWGQGCATVGHFGVYTRVSQYIEWLQKLMRSEPRPGVLLRAPFP

SEQ ID NO: 69 - protein, 466 aa, Homo sapiens
  FVII variant (precursor A266T)
MVSQALRLLCLLLGLQGCLAAGGVAKASGGETRDMPWKPGPHRVFVTQEEAHGVLHRRRRANAFLEELRPGSLERECKEEQCSFEEAREIFKDAERTKLFWISYSDGDQCASSPCQNGGSCKDQLQSYICFCLPAFEGRNCETHKDDQLICVNENGGCEQYCSDHTGTKRSCRCHEGYSLLADGVSCTPTVEYPCGKIPILEKRNASKPQGRIVGGKVCPKGECPWQVLLLVNGAQLCGGTLINTIWVVSAAHCFDKIKNWRNLITVLGEHDLSEHDGDEQSRRVAQVIIPSTYVPGTTNHDIALLRLHQPVVLTDHVVPLCLPERTFSERTLAFVRFSLVSGWGQLLDRGATALELMVLNVPRLMTQDCLQQSRKVGDSPNITEYMFCAGYSDGSKDSCKGDSGGPHATHYRGTWYLTGIVSWGQGCATVGHFGVYTRVSQYIEWLQKLMRSEPRPGVLLRAPFP

SEQ ID NO: 70 - protein, 466 aa, Homo sapiens
  FVII variant (precursor R283W)
MVSQALRLLCLLLGLQGCLAAGGVAKASGGETRDMPWKPGPHRVFVTQEEAHGVLHRRRRANAFLEELRPGSLERECKEEQCSFEEAREIFKDAERTKLFWISYSDGDQCASSPCQNGGSCKDQLQSYICFCLPAFEGRNCETHKDDQLICVNENGGCEQYCSDHTGTKRSCRCHEGYSLLADGVSCTPTVEYPCGKIPILEKRNASKPQGRIVGGKVCPKGECPWQVLLLVNGAQLCGGTLINTIWVVSAAHCFDKIKNWRNLIAVLGEHDLSEHDGDEQSWRVAQVIIPSTYVPGTTNHDIALLRLHQPVVLTDHVVPLCLPERTFSERTLAFVRFSLVSGWGQLLDRGATALELMVLNVPRLMTQDCLQQSRKVGDSPNITEYMFCAGYSDGSKDSCKGDSGGPHATHYRGTWYLTGIVSWGQGCATVGHFGVYTRVSQYIEWLQKLMRSEPRPGVLLRAPFP

SEQ ID NO: 71 - protein, 466 aa, Homo sapiens
  FVII variant (precursor V295D)
MVSQALRLLCLLLGLQGCLAAGGVAKASGGETRDMPWKPGPHRVFVTQEEAHGVLHRRRRANAFLEELRPGSLERECKEEQCSFEEAREIFKDAERTKLFWISYSDGDQCASSPCQNGGSCKDQLQSYICFCLPAFEGRNCETHKDDQLICVNENGGCEQYCSDHTGTKRSCRCHEGYSLLADGVSCTPTVEYPCGKIPILEKRNASKPQGRIVGGKVCPKGECPWQVLLLVNGAQLCGGTLINTIWVVSAAHCFDKIKNWRNLIAVLGEHDLSEHDGDEQSRRVAQVIIPSTYDPGTTNHDIALLRLHQPVVLTDHVVPLCLPERTFSERTLAFVRFSLVSGWGQLLDRGATALELMVLNVPRLMTQDCLQQSRKVGDSPNITEYMFCAGYSDGSKDSCKGDSGGPHATHYRGTWYLTGIVSWGQGCATVGHFGVYTRVSQYIEWLQKLMRSEPRPGVLLRAPFP

SEQ ID NO: 72 - protein, 466 aa, Homo sapiens
  FVII variant (precursor D302H)
MVSQALRLLCLLLGLQGCLAAGGVAKASGGETRDMPWKPGPHRVFVTQEEAHGVLHRRRRANAFLEELRPGSLERECKEEQCSFEEAREIFKDAERTKLFWISYSDGDQCASSPCQNGGSCKDQLQSYICFCLPAFEGRNCETHKDDQLICVNENGGCEQYCSDHTGTKRSCRCHEGYSLLADGVSCTPTVEYPCGKIPILEKRNASKPQGRIVGGKVCPKGECPWQVLLLVNGAQLCGGTLINTIWVVSAAHCFDKIKNWRNLIAVLGEHDLSEHDGDEQSRRVAQVIIPSTYVPGTTNHHIALLRLHQPVVLTDHVVPLCLPERTFSERTLAFVRFSLVSGWGQLLDRGATALELMVLNVPRLMTQDCLQQSRKVGDSPNITEYMFCAGYSDGSKDSCKGDSGGPHATHYRGTWYLTGIVSWGQGCATVGHFGVYTRVSQYIEWLQKLMRSEPRPGVLLRAPFP

SEQ ID NO: 73 - protein, 466 aa, Homo sapiens
  FVII variant (precursor D302N)
MVSQALRLLCLLLGLQGCLAAGGVAKASGGETRDMPWKPGPHRVFVTQEEAHGVLHRRRRANAFLEELRPGSLERECKEEQCSFEEAREIFKDAERTKLFWISYSDGDQCASSPCQNGGSCKDQLQSYICFCLPAFEGRNCETHKDDQLICVNENGGCEQYCSDHTGTKRSCRCHEGYSLLADGVSCTPTVEYPCGKIPILEKRNASKPQGRIVGGKVCPKGECPWQVLLLVNGAQLCGGTLINTIWVVSAAHCFDKIKNWRNLIAVLGEHDLSEHDGDEQSRRVAQVIIPSTYVPGTTNHNIALLRLHQPVVLTDHVVPLCLPERTFSERTLAFVRFSLVSGWGQLLDRGATALELMVLNVPRLMTQDCLQQSRKVGDSPNITEYMFCAGYSDGSKDSCKGDSGGPHATHYRGTWYLTGIVSWGQGCATVGHFGVYTRVSQYIEWLQKLMRSEPRPGVLLRAPFP

SEQ ID NO: 74 - protein, 466 aa, Homo sapiens
  FVII variant (precursor A304T)
MVSQALRLLCLLLGLQGCLAAGGVAKASGGETRDMPWKPGPHRVFVTQEEAHGVLHRRRRANAFLEELRPGSLERECKEEQCSFEEAREIFKDAERTKLFWISYSDGDQCASSPCQNGGSCKDQLQSYICFCLPAFEGRNCETHKDDQLICVNENGGCEQYCSDHTGTKRSCRCHEGYSLLADGVSCTPTVEYPCGKIPILEKRNASKPQGRIVGGKVCPKGECPWQVLLLVNGAQLCGGTLINTIWVVSAAHCFDKIKNWRNLIAVLGEHDLSEHDGDEQSRRVAQVIIPSTYVPGTTNHDITLLRLHQPVVLTDHVVPLCLPERTFSERTLAFVRFSLVSGWGQLLDRGATALELMVLNVPRLMTQDCLQQSRKVGDSPNITEYMFCAGYSDGSKDSCKGDSGGPHATHYRGTWYLTGIVSWGQGCATVGHFGVYTRVSQYIEWLQKLMRSEPRPGVLLRAPFP

SEQ ID NO: 75 - protein, 466 aa, Homo sapiens
  FVII variant (precursor A304V)
MVSQALRLLCLLLGLQGCLAAGGVAKASGGETRDMPWKPGPHRVFVTQEEAHGVLHRRRRANAFLEELRPGSLERECKEEQCSFEEAREIFKDAERTKLFWISYSDGDQCASSPCQNGGSCKDQLQSYICFCLPAFEGRNCETHKDDQLICVNENGGCEQYCSDHTGTKRSCRCHEGYSLLADGVSCTPTVEYPCGKIPILEKRNASKPQGRIVGGKVCPKGECPWQVLLLVNGAQLCGGTLINTIWVVSAAHCFDKIKNWRNLIAVLGEHDLSEHDGDEQSRRVAQVIIPSTYVPGTTNHDIVLLRLHQPVVLTDHVVPLCLPERTFSERTLAFVRFSLVSGWGQLLDRGATALELMVLNVPRLMTQDCLQQSRKVGDSPNITEYMFCAGYSDGSKDSCKGDSGGPHATHYRGTWYLTGIVSWGQGCATVGHFGVYTRVSQYIEWLQKLMRSEPRPGVLLRAPFP

SEQ ID NO: 76 - protein, 466 aa, Homo sapiens
  FVII variant (precursor R307C)
MVSQALRLLCLLLGLQGCLAAGGVAKASGGETRDMPWKPGPHRVFVTQEEAHGVLHRRRRANAFLEELRPGSLERECKEEQCSFEEAREIFKDAERTKLFWISYSDGDQCASSPCQNGGSCKDQLQSYICFCLPAFEGRNCETHKDDQLICVNENGGCEQYCSDHTGTKRSCRCHEGYSLLADGVSCTPTVEYPCGKIPILEKRNASKPQGRIVGGKVCPKGECPWQVLLLVNGAQLCGGTLINTIWVVSAAHCFDKIKNWRNLIAVLGEHDLSEHDGDEQSRRVAQVIIPSTYVPGTTNHDIALLCLHQPVVLTDHVVPLCLPERTFSERTLAFVRFSLVSGWGQLLDRGATALELMVLNVPRLMTQDCLQQSRKVGDSPNITEYMFCAGYSDGSKDSCKGDSGGPHATHYRGTWYLTGIVSWGQGCATVGHFGVYTRVSQYIEWLQKLMRSEPRPGVLLRAPFP

SEQ ID NO: 77 - protein, 466 aa, Homo sapiens
  FVII variant (precursor R307H)
MVSQALRLLCLLLGLQGCLAAGGVAKASGGETRDMPWKPGPHRVFVTQEEAHGVLHRRRRANAFLEELRPGSLERECKEEQCSFEEAREIFKDAERTKLFWISYSDGDQCASSPCQNGGSCKDQLQSYICFCLPAFEGRNCETHKDDQLICVNENGGCEQYCSDHTGTKRSCRCHEGYSLLADGVSCTPTVEYPCGKIPILEKRNASKPQGRIVGGKVCPKGECPWQVLLLVNGAQLCGGTLINTIWVVSAAHCFDKIKNWRNLIAVLGEHDLSEHDGDEQSRRVAQVIIPSTYVPGTTNHDIALLHLHQPVVLTDHVVPLCLPERTFSERTLAFVRFSLVSGWGQLLDRGATALELMVLNVPRLMTQDCLQQSRKVGDSPNITEYMFCAGYSDGSKDSCKGDSGGPHATHYRGTWYLTGIVSWGQGCATVGHFGVYTRVSQYIEWLQKLMRSEPRPGVLLRAPFP

SEQ ID NO: 78 - protein, 466 aa, Homo sapiens
  FVII variant (precursor V312M)
MVSQALRLLCLLLGLQGCLAAGGVAKASGGETRDMPWKPGPHRVFVTQEEAHGVLHRRRRANAFLEELRPGSLERECKEEQCSFEEAREIFKDAERTKLFWISYSDGDQCASSPCQNGGSCKDQLQSYICFCLPAFEGRNCETHKDDQLICVNENGGCEQYCSDHTGTKRSCRCHEGYSLLADGVSCTPTVEYPCGKIPILEKRNASKPQGRIVGGKVCPKGECPWQVLLLVNGAQLCGGTLINTIWVVSAAHCFDKIKNWRNLIAVLGEHDLSEHDGDEQSRRVAQVIIPSTYVPGTTNHDIALLRLHQPMVLTDHVVPLCLPERTFSERTLAFVRFSLVSGWGQLLDRGATALELMVLNVPRLMTQDCLQQSRKVGDSPNITEYMFCAGYSDGSKDSCKGDSGGPHATHYRGTWYLTGIVSWGQGCATVGHFGVYTRVSQYIEWLQKLMRSEPRPGVLLRAPFP

SEQ ID NO: 79 - protein, 466 aa, Homo sapiens
  FVII variant (precursor E325K)
MVSQALRLLCLLLGLQGCLAAGGVAKASGGETRDMPWKPGPHRVFVTQEEAHGVLHRRRRANAFLEELRPGSLERECKEEQCSFEEAREIFKDAERTKLFWISYSDGDQCASSPCQNGGSCKDQLQSYICFCLPAFEGRNCETHKDDQLICVNENGGCEQYCSDHTGTKRSCRCHEGYSLLADGVSCTPTVEYPCGKIPILEKRNASKPQGRIVGGKVCPKGECPWQVLLLVNGAQLCGGTLINTIWVVSAAHCFDKIKNWRNLIAVLGEHDLSEHDGDEQSRRVAQVIIPSTYVPGTTNHDIALLRLHQPVVLTDHVVPLCLPKRTFSERTLAFVRFSLVSGWGQLLDRGATALELMVLNVPRLMTQDCLQQSRKVGDSPNITEYMFCAGYSDGSKDSCKGDSGGPHATHYRGTWYLTGIVSWGQGCATVGHFGVYTRVSQYIEWLQKLMRSEPRPGVLLRAPFP

SEQ ID NO: 80 - protein, 466 aa, Homo sapiens
  FVII variant (precursor T332M)
MVSQALRLLCLLLGLQGCLAAGGVAKASGGETRDMPWKPGPHRVFVTQEEAHGVLHRRRRANAFLEELRPGSLERECKEEQCSFEEAREIFKDAERTKLFWISYSDGDQCASSPCQNGGSCKDQLQSYICFCLPAFEGRNCETHKDDQLICVNENGGCEQYCSDHTGTKRSCRCHEGYSLLADGVSCTPTVEYPCGKIPILEKRNASKPQGRIVGGKVCPKGECPWQVLLLVNGAQLCGGTLINTIWVVSAAHCFDKIKNWRNLIAVLGEHDLSEHDGDEQSRRVAQVIIPSTYVPGTTNHDIALLRLHQPVVLTDHVVPLCLPERTFSERMLAFVRFSLVSGWGQLLDRGATALELMVLNVPRLMTQDCLQQSRKVGDSPNITEYMFCAGYSDGSKDSCKGDSGGPHATHYRGTWYLTGIVSWGQGCATVGHFGVYTRVSQYIEWLQKLMRSEPRPGVLLRAPFP

SEQ ID NO: 81 - protein, 466 aa, Homo sapiens
  FVII variant (precursor V341F)
MVSQALRLLCLLLGLQGCLAAGGVAKASGGETRDMPWKPGPHRVFVTQEEAHGVLHRRRRANAFLEELRPGSLERECKEEQCSFEEAREIFKDAERTKLFWISYSDGDQCASSPCQNGGSCKDQLQSYICFCLPAFEGRNCETHKDDQLICVNENGGCEQYCSDHTGTKRSCRCHEGYSLLADGVSCTPTVEYPCGKIPILEKRNASKPQGRIVGGKVCPKGECPWQVLLLVNGAQLCGGTLINTIWVVSAAHCFDKIKNWRNLIAVLGEHDLSEHDGDEQSRRVAQVIIPSTYVPGTTNHDIALLRLHQPVVLTDHVVPLCLPERTFSERTLAFVRFSLFSGWGQLLDRGATALELMVLNVPRLMTQDCLQQSRKVGDSPNITEYMFCAGYSDGSKDSCKGDSGGPHATHYRGTWYLTGIVSWGQGCATVGHFGVYTRVSQYIEWLQKLMRSEPRPGVLLRAPFP

SEQ ID NO: 82 - protein, 466 aa, Homo sapiens
  FVII variant (precursor A352T)
MVSQALRLLCLLLGLQGCLAAGGVAKASGGETRDMPWKPGPHRVFVTQEEAHGVLHRRRRANAFLEELRPGSLERECKEEQCSFEEAREIFKDAERTKLFWISYSDGDQCASSPCQNGGSCKDQLQSYICFCLPAFEGRNCETHKDDQLICVNENGGCEQYCSDHTGTKRSCRCHEGYSLLADGVSCTPTVEYPCGKIPILEKRNASKPQGRIVGGKVCPKGECPWQVLLLVNGAQLCGGTLINTIWVVSAAHCFDKIKNWRNLIAVLGEHDLSEHDGDEQSRRVAQVIIPSTYVPGTTNHDIALLRLHQPVVLTDHVVPLCLPERTFSERTLAFVRFSLVSGWGQLLDRGTTALELMVLNVPRLMTQDCLQQSRKVGDSPNITEYMFCAGYSDGSKDSCKGDSGGPHATHYRGTWYLTGIVSWGQGCATVGHFGVYTRVSQYIEWLQKLMRSEPRPGVLLRAPFP

SEQ ID NO: 83 - protein, 466 aa, Homo sapiens
  FVII variant (precursor A354V)
MVSQALRLLCLLLGLQGCLAAGGVAKASGGETRDMPWKPGPHRVFVTQEEAHGVLHRRRRANAFLEELRPGSLERECKEEQCSFEEAREIFKDAERTKLFWISYSDGDQCASSPCQNGGSCKDQLQSYICFCLPAFEGRNCETHKDDQLICVNENGGCEQYCSDHTGTKRSCRCHEGYSLLADGVSCTPTVEYPCGKIPILEKRNASKPQGRIVGGKVCPKGECPWQVLLLVNGAQLCGGTLINTIWVVSAAHCFDKIKNWRNLIAVLGEHDLSEHDGDEQSRRVAQVIIPSTYVPGTTNHDIALLRLHQPVVLTDHVVPLCLPERTFSERTLAFVRFSLVSGWGQLLDRGATVLELMVLNVPRLMTQDCLQQSRKVGDSPNITEYMFCAGYSDGSKDSCKGDSGGPHATHYRGTWYLTGIVSWGQGCATVGHFGVYTRVSQYIEWLQKLMRSEPRPGVLLRAPFP

SEQ ID NO: 84 - protein, 466 aa, Homo sapiens
  FVII variant (precursor M358I)
MVSQALRLLCLLLGLQGCLAAGGVAKASGGETRDMPWKPGPHRVFVTQEEAHGVLHRRRRANAFLEELRPGSLERECKEEQCSFEEAREIFKDAERTKLFWISYSDGDQCASSPCQNGGSCKDQLQSYICFCLPAFEGRNCETHKDDQLICVNENGGCEQYCSDHTGTKRSCRCHEGYSLLADGVSCTPTVEYPCGKIPILEKRNASKPQGRIVGGKVCPKGECPWQVLLLVNGAQLCGGTLINTIWVVSAAHCFDKIKNWRNLIAVLGEHDLSEHDGDEQSRRVAQVIIPSTYVPGTTNHDIALLRLHQPVVLTDHVVPLCLPERTFSERTLAFVRFSLVSGWGQLLDRGATALELIVLNVPRLMTQDCLQQSRKVGDSPNITEYMFCAGYSDGSKDSCKGDSGGPHATHYRGTWYLTGIVSWGQGCATVGHFGVYTRVSQYIEWLQKLMRSEPRPGVLLRAPFP

SEQ ID NO: 85 - protein, 466 aa, Homo sapiens
  FVII variant (precursor M358V)
MVSQALRLLCLLLGLQGCLAAGGVAKASGGETRDMPWKPGPHRVFVTQEEAHGVLHRRRRANAFLEELRPGSLERECKEEQCSFEEAREIFKDAERTKLFWISYSDGDQCASSPCQNGGSCKDQLQSYICFCLPAFEGRNCETHKDDQLICVNENGGCEQYCSDHTGTKRSCRCHEGYSLLADGVSCTPTVEYPCGKIPILEKRNASKPQGRIVGGKVCPKGECPWQVLLLVNGAQLCGGTLINTIWVVSAAHCFDKIKNWRNLIAVLGEHDLSEHDGDEQSRRVAQVIIPSTYVPGTTNHDIALLRLHQPVVLTDHVVPLCLPERTFSERTLAFVRFSLVSGWGQLLDRGATALELVVLNVPRLMTQDCLQQSRKVGDSPNITEYMFCAGYSDGSKDSCKGDSGGPHATHYRGTWYLTGIVSWGQGCATVGHFGVYTRVSQYIEWLQKLMRSEPRPGVLLRAPFP

SEQ ID NO: 86 - protein, 466 aa, Homo sapiens
  FVII variant (precursor P363R)
MVSQALRLLCLLLGLQGCLAAGGVAKASGGETRDMPWKPGPHRVFVTQEEAHGVLHRRRRANAFLEELRPGSLERECKEEQCSFEEAREIFKDAERTKLFWISYSDGDQCASSPCQNGGSCKDQLQSYICFCLPAFEGRNCETHKDDQLICVNENGGCEQYCSDHTGTKRSCRCHEGYSLLADGVSCTPTVEYPCGKIPILEKRNASKPQGRIVGGKVCPKGECPWQVLLLVNGAQLCGGTLINTIWVVSAAHCFDKIKNWRNLIAVLGEHDLSEHDGDEQSRRVAQVIIPSTYVPGTTNHDIALLRLHQPVVLTDHVVPLCLPERTFSERTLAFVRFSLVSGWGQLLDRGATALELMVLNVRRLMTQDCLQQSRKVGDSPNITEYMFCAGYSDGSKDSCKGDSGGPHATHYRGTWYLTGIVSWGQGCATVGHFGVYTRVSQYIEWLQKLMRSEPRPGVLLRAPFP

SEQ ID NO: 87 - protein, 466 aa, Homo sapiens
  FVII variant (precursor R364Q)
MVSQALRLLCLLLGLQGCLAAGGVAKASGGETRDMPWKPGPHRVFVTQEEAHGVLHRRRRANAFLEELRPGSLERECKEEQCSFEEAREIFKDAERTKLFWISYSDGDQCASSPCQNGGSCKDQLQSYICFCLPAFEGRNCETHKDDQLICVNENGGCEQYCSDHTGTKRSCRCHEGYSLLADGVSCTPTVEYPCGKIPILEKRNASKPQGRIVGGKVCPKGECPWQVLLLVNGAQLCGGTLINTIWVVSAAHCFDKIKNWRNLIAVLGEHDLSEHDGDEQSRRVAQVIIPSTYVPGTTNHDIALLRLHQPVVLTDHVVPLCLPERTFSERTLAFVRFSLVSGWGQLLDRGATALELMVLNVPQLMTQDCLQQSRKVGDSPNITEYMFCAGYSDGSKDSCKGDSGGPHATHYRGTWYLTGIVSWGQGCATVGHFGVYTRVSQYIEWLQKLMRSEPRPGVLLRAPFP

SEQ ID NO: 88 - protein, 466 aa, Homo sapiens
  FVII variant (precursor T367S)
MVSQALRLLCLLLGLQGCLAAGGVAKASGGETRDMPWKPGPHRVFVTQEEAHGVLHRRRRANAFLEELRPGSLERECKEEQCSFEEAREIFKDAERTKLFWISYSDGDQCASSPCQNGGSCKDQLQSYICFCLPAFEGRNCETHKDDQLICVNENGGCEQYCSDHTGTKRSCRCHEGYSLLADGVSCTPTVEYPCGKIPILEKRNASKPQGRIVGGKVCPKGECPWQVLLLVNGAQLCGGTLINTIWVVSAAHCFDKIKNWRNLIAVLGEHDLSEHDGDEQSRRVAQVIIPSTYVPGTTNHDIALLRLHQPVVLTDHVVPLCLPERTFSERTLAFVRFSLVSGWGQLLDRGATALELMVLNVPRLMSQDCLQQSRKVGDSPNITEYMFCAGYSDGSKDSCKGDSGGPHATHYRGTWYLTGIVSWGQGCATVGHFGVYTRVSQYIEWLQKLMRSEPRPGVLLRAPFP

SEQ ID NO: 89 - protein, 466 aa, Homo sapiens
  FVII variant (precursor C370F)
MVSQALRLLCLLLGLQGCLAAGGVAKASGGETRDMPWKPGPHRVFVTQEEAHGVLHRRRRANAFLEELRPGSLERECKEEQCSFEEAREIFKDAERTKLFWISYSDGDQCASSPCQNGGSCKDQLQSYICFCLPAFEGRNCETHKDDQLICVNENGGCEQYCSDHTGTKRSCRCHEGYSLLADGVSCTPTVEYPCGKIPILEKRNASKPQGRIVGGKVCPKGECPWQVLLLVNGAQLCGGTLINTIWVVSAAHCFDKIKNWRNLIAVLGEHDLSEHDGDEQSRRVAQVIIPSTYVPGTTNHDIALLRLHQPVVLTDHVVPLCLPERTFSERTLAFVRFSLVSGWGQLLDRGATALELMVLNVPRLMTQDFLQQSRKVGDSPNITEYMFCAGYSDGSKDSCKGDSGGPHATHYRGTWYLTGIVSWGQGCATVGHFGVYTRVSQYIEWLQKLMRSEPRPGVLLRAPFP

SEQ ID NO: 90 - protein, 466 aa, Homo sapiens
  FVII variant (precursor C389G)
MVSQALRLLCLLLGLQGCLAAGGVAKASGGETRDMPWKPGPHRVFVTQEEAHGVLHRRRRANAFLEELRPGSLERECKEEQCSFEEAREIFKDAERTKLFWISYSDGDQCASSPCQNGGSCKDQLQSYICFCLPAFEGRNCETHKDDQLICVNENGGCEQYCSDHTGTKRSCRCHEGYSLLADGVSCTPTVEYPCGKIPILEKRNASKPQGRIVGGKVCPKGECPWQVLLLVNGAQLCGGTLINTIWVVSAAHCFDKIKNWRNLIAVLGEHDLSEHDGDEQSRRVAQVIIPSTYVPGTTNHDIALLRLHQPVVLTDHVVPLCLPERTFSERTLAFVRFSLVSGWGQLLDRGATALELMVLNVPRLMTQDCLQQSRKVGDSPNITEYMFGAGYSDGSKDSCKGDSGGPHATHYRGTWYLTGIVSWGQGCATVGHFGVYTRVSQYIEWLQKLMRSEPRPGVLLRAPFP

SEQ ID NO: 91 - protein, 466 aa, Homo sapiens
  FVII variant (precursor G391S)
MVSQALRLLCLLLGLQGCLAAGGVAKASGGETRDMPWKPGPHRVFVTQEEAHGVLHRRRRANAFLEELRPGSLERECKEEQCSFEEAREIFKDAERTKLFWISYSDGDQCASSPCQNGGSCKDQLQSYICFCLPAFEGRNCETHKDDQLICVNENGGCEQYCSDHTGTKRSCRCHEGYSLLADGVSCTPTVEYPCGKIPILEKRNASKPQGRIVGGKVCPKGECPWQVLLLVNGAQLCGGTLINTIWVVSAAHCFDKIKNWRNLIAVLGEHDLSEHDGDEQSRRVAQVIIPSTYVPGTTNHDIALLRLHQPVVLTDHVVPLCLPERTFSERTLAFVRFSLVSGWGQLLDRGATALELMVLNVPRLMTQDCLQQSRKVGDSPNITEYMFCASYSDGSKDSCKGDSGGPHATHYRGTWYLTGIVSWGQGCATVGHFGVYTRVSQYIEWLQKLMRSEPRPGVLLRAPFP

SEQ ID NO: 92 - protein, 466 aa, Homo sapiens
  FVII variant (precursor G402E)
MVSQALRLLCLLLGLQGCLAAGGVAKASGGETRDMPWKPGPHRVFVTQEEAHGVLHRRRRANAFLEELRPGSLERECKEEQCSFEEAREIFKDAERTKLFWISYSDGDQCASSPCQNGGSCKDQLQSYICFCLPAFEGRNCETHKDDQLICVNENGGCEQYCSDHTGTKRSCRCHEGYSLLADGVSCTPTVEYPCGKIPILEKRNASKPQGRIVGGKVCPKGECPWQVLLLVNGAQLCGGTLINTIWVVSAAHCFDKIKNWRNLIAVLGEHDLSEHDGDEQSRRVAQVIIPSTYVPGTTNHDIALLRLHQPVVLTDHVVPLCLPERTFSERTLAFVRFSLVSGWGQLLDRGATALELMVLNVPRLMTQDCLQQSRKVGDSPNITEYMFCAGYSDGSKDSCKEDSGGPHATHYRGTWYLTGIVSWGQGCATVGHFGVYTRVSQYIEWLQKLMRSEPRPGVLLRAPFP

SEQ ID NO: 93 - protein, 466 aa, Homo sapiens
  FVII variant (precursor G402R)
MVSQALRLLCLLLGLQGCLAAGGVAKASGGETRDMPWKPGPHRVFVTQEEAHGVLHRRRRANAFLEELRPGSLERECKEEQCSFEEAREIFKDAERTKLFWISYSDGDQCASSPCQNGGSCKDQLQSYICFCLPAFEGRNCETHKDDQLICVNENGGCEQYCSDHTGTKRSCRCHEGYSLLADGVSCTPTVEYPCGKIPILEKRNASKPQGRIVGGKVCPKGECPWQVLLLVNGAQLCGGTLINTIWVVSAAHCFDKIKNWRNLIAVLGEHDLSEHDGDEQSRRVAQVIIPSTYVPGTTNHDIALLRLHQPVVLTDHVVPLCLPERTFSERTLAFVRFSLVSGWGQLLDRGATALELMVLNVPRLMTQDCLQQSRKVGDSPNITEYMFCAGYSDGSKDSCKRDSGGPHATHYRGTWYLTGIVSWGQGCATVGHFGVYTRVSQYIEWLQKLMRSEPRPGVLLRAPFP

SEQ ID NO: 94 - protein, 466 aa, Homo sapiens
  FVII variant (precursor D403H)
MVSQALRLLCLLLGLQGCLAAGGVAKASGGETRDMPWKPGPHRVFVTQEEAHGVLHRRRRANAFLEELRPGSLERECKEEQCSFEEAREIFKDAERTKLFWISYSDGDQCASSPCQNGGSCKDQLQSYICFCLPAFEGRNCETHKDDQLICVNENGGCEQYCSDHTGTKRSCRCHEGYSLLADGVSCTPTVEYPCGKIPILEKRNASKPQGRIVGGKVCPKGECPWQVLLLVNGAQLCGGTLINTIWVVSAAHCFDKIKNWRNLIAVLGEHDLSEHDGDEQSRRVAQVIIPSTYVPGTTNHDIALLRLHQPVVLTDHVVPLCLPERTFSERTLAFVRFSLVSGWGQLLDRGATALELMVLNVPRLMTQDCLQQSRKVGDSPNITEYMFCAGYSDGSKDSCKGHSGGPHATHYRGTWYLTGIVSWGQGCATVGHFGVYTRVSQYIEWLQKLMRSEPRPGVLLRAPFP

SEQ ID NO: 95 - protein, 466 aa, Homo sapiens [sequence omitted]

SEQ ID NO: 96 - protein, 466 aa, Homo sapiens
  FVII variant (precursor T419M)
MVSQALRLLCLLLGLQGCLAAGGVAKASGGETRDMPWKPGPHRVFVTQEEAHGVLHRRRRANAFLEELRPGSLERECKEEQCSFEEAREIFKDAERTKLFWISYSDGDQCASSPCQNGGSCKDQLQSYICFCLPAFEGRNCETHKDDQLICVNENGGCEQYCSDHTGTKRSCRCHEGYSLLADGVSCTPTVEYPCGKIPILEKRNASKPQGRIVGGKVCPKGECPWQVLLLVNGAQLCGGTLINTIWVVSAAHCFDKIKNWRNLIAVLGEHDLSEHDGDEQSRRVAQVIIPSTYVPGTTNHDIALLRLHQPVVLTDHVVPLCLPERTFSERTLAFVRFSLVSGWGQLLDRGATALELMVLNVPRLMTQDCLQQSRKVGDSPNITEYMFCAGYSDGSKDSCKGDSGGPHATHYRGTWYLMGIVSWGQGCATVGHFGVYTRVSQYIEWLQKLMRSEPRPGVLLRAPFP

SEQ ID NO: 97 - protein, 466 aa, Homo sapiens
  FVII variant (precursor G435E)
MVSQALRLLCLLLGLQGCLAAGGVAKASGGETRDMPWKPGPHRVFVTQEEAHGVLHRRRRANAFLEELRPGSLERECKEEQCSFEEAREIFKDAERTKLFWISYSDGDQCASSPCQNGGSCKDQLQSYICFCLPAFEGRNCETHKDDQLICVNENGGCEQYCSDHTGTKRSCRCHEGYSLLADGVSCTPTVEYPCGKIPILEKRNASKPQGRIVGGKVCPKGECPWQVLLLVNGAQLCGGTLINTIWVVSAAHCFDKIKNWRNLIAVLGEHDLSEHDGDEQSRRVAQVIIPSTYVPGTTNHDIALLRLHQPVVLTDHVVPLCLPERTFSERTLAFVRFSLVSGWGQLLDRGATALELMVLNVPRLMTQDCLQQSRKVGDSPNITEYMFCAGYSDGSKDSCKGDSGGPHATHYRGTWYLTGIVSWGQGCATVGHFEVYTRVSQYIEWLQKLMRSEPRPGVLLRAPFP

SEQ ID NO: 98 - protein, 466 aa, Homo sapiens
  FVII variant (precursor E445K)
MVSQALRLLCLLLGLQGCLAAGGVAKASGGETRDMPWKPGPHRVFVTQEEAHGVLHRRRRANAFLEELRPGSLERECKEEQCSFEEAREIFKDAERTKLFWISYSDGDQCASSPCQNGGSCKDQLQSYICFCLPAFEGRNCETHKDDQLICVNENGGCEQYCSDHTGTKRSCRCHEGYSLLADGVSCTPTVEYPCGKIPILEKRNASKPQGRIVGGKVCPKGECPWQVLLLVNGAQLCGGTLINTIWVVSAAHCFDKIKNWRNLIAVLGEHDLSEHDGDEQSRRVAQVIIPSTYVPGTTNHDIALLRLHQPVVLTDHVVPLCLPERTFSERTLAFVRFSLVSGWGQLLDRGATALELMVLNVPRLMTQDCLQQSRKVGDSPNITEYMFCAGYSDGSKDSCKGDSGGPHATHYRGTWYLTGIVSWGQGCATVGHFGVYTRVSQYIKWLQKLMRSEPRPGVLLRAPFP

SEQ ID NO: 99 - protein, 466 aa, Homo sapiens
  FVII variant (precursor R375W)
MVSQALRLLCLLLGLQGCLAAGGVAKASGGETRDMPWKPGPHRVFVTQEEAHGVLHRRRRANAFLEELRPGSLERECKEEQCSFEEAREIFKDAERTKLFWISYSDGDQCASSPCQNGGSCKDQLQSYICFCLPAFEGRNCETHKDDQLICVNENGGCEQYCSDHTGTKRSCRCHEGYSLLADGVSCTPTVEYPCGKIPILEKRNASKPQGRIVGGKVCPKGECPWQVLLLVNGAQLCGGTLINTIWVVSAAHCFDKIKNWRNLIAVLGEHDLSEHDGDEQSRRVAQVIIPSTYVPGTTNHDIALLRLHQPVVLTDHVVPLCLPERTFSERTLAFVRFSLVSGWGQLLDRGATALELMVLNVPRLMTQDCLQQSWKVGDSPNITEYMFCAGYSDGSKDSCKGDSGGPHATHYRGTWYLTGIVSWGQGCATVGHFGVYTRVSQYIEWLQKLMRSEPRPGVLLRAPFP

SEQ ID NO: 100 - protein, 466 aa, Homo sapiens
  FVII variant (precursor R375K)
MVSQALRLLCLLLGLQGCLAAGGVAKASGGETRDMPWKPGPHRVFVTQEEAHGVLHRRRRANAFLEELRPGSLERECKEEQCSFEEAREIFKDAERTKLFWISYSDGDQCASSPCQNGGSCKDQLQSYICFCLPAFEGRNCETHKDDQLICVNENGGCEQYCSDHTGTKRSCRCHEGYSLLADGVSCTPTVEYPCGKIPILEKRNASKPQGRIVGGKVCPKGECPWQVLLLVNGAQLCGGTLINTIWVVSAAHCFDKIKNWRNLIAVLGEHDLSEHDGDEQSRRVAQVIIPSTYVPGTTNHDIALLRLHQPVVLTDHVVPLCLPERTFSERTLAFVRFSLVSGWGQLLDRGATALELMVLNVPRLMTQDCLQQSKKVGDSPNITEYMFCAGYSDGSKDSCKGDSGGPHATHYRGTWYLTGIVSWGQGCATVGHFGVYTRVSQYIEWLQKLMRSEPRPGVLLRAPFP

SEQ ID NO: 101 - protein, 304 aa, Homo sapiens
  TFPI isoform a precursor
MIYTMKKVHALWASVCLLLNLAPAPLNADSEEDEEHTIITDTELPPLKLMHSFCAFKADDGPCKAIMKRFFFNIFTRQCEEFIYGGCEGNQNRFESLEECKKMCTRDNANRIIKTTLQQEKPDFCFLEEDPGICRGYITRYFYNNQTKQCERFKYGGCLGNMNNFETLEECKNICEDGPNGFQVDNYGTQLNAVNNSLTPQSTKVPSLFEFHGPSWCLTPADRGLCRANENRFYYNSVIGKCRPFKYSGCGGNENNFTSKQECLRACKKGFIQRISKGGLIKTKRKRKKQRVKIAYEEIFVKNM

SEQ ID NO: 102 - protein, 276 aa, Homo sapiens
  TFPI isoform a mature
DSEEDEEHTIITDTELPPLKLMHSFCAFKADDGPCKAIMKRFFFNIFTRQCEEFIYGGCEGNQNRFESLEECKKMCTRDNANRIIKTTLQQEKPDFCFLEEDPGICRGYITRYFYNNQTKQCERFKYGGCLGNMNNFETLEECKNICEDGPNGFQVDNYGTQLNAVNNSLTPQSTKVPSLFEFHGPSWCLTPADRGLCRANENRFYYNSVIGKCRPFKYSGCGGNENNFTSKQECLRACKKGFIQRISKGGLIKTKRKRKKQRVKIAYEEIFVKNM

SEQ ID NO: 103 - protein, 251 aa, Homo sapiens
  TFPI isoform b precursor
MIYTMKKVHALWASVCLLLNLAPAPLNADSEEDEEHTIITDTELPPLKLMHSFCAFKADDGPCKAIMKRFFFNIFTRQCEEFIYGGCEGNQNRFESLEECKKMCTRDNANRIIKTTLQQEKPDFCFLEEDPGICRGYITRYFYNNQTKQCERFKYGGCLGNMNNFETLEECKNICEDGPNGFQVDNYGTQLNAVNNSLTPQSTKVPSLFVTKEGTNDGWKNAAHIYQVFLNAFCIHASMFFLGLDSISCLC

SEQ ID NO: 104 - protein, 222 aa, Homo sapiens
  TFPI isoform b mature
SEEDEEHTIITDTELPPLKLMHSFCAFKADDGPCKAIMKRFFFNIFTRQCEEFIYGGCEGNQNRFESLEECKKMCTRDNANRIIKTTLQQEKPDFCFLEEDPGICRGYITRYFYNNQTKQCERFKYGGCLGNMNNFETLEECKNICEDGPNGFQVDNYGTQLNAVNNSLTPQSTKVPSLFVTKEGTNDGWKNAAHIYQVFLNAFCIHASMFFLGLDSISCLC

SEQ ID NO: 105 - protein, 213 aa, Homo sapiens
  TFPI-2 mature
DAAQEPTGNNAEICLLPLDYGPCRALLLRYYYDRYTQSCRQFLYGGCEGNANNFYTWEACDDACWRIEKVPKVCRLQVSVDDQCEGSTEKYFFNLSSMTCEKFFSGGCHRNRIENRFPDEATCMGFCAPKKIPSFCYSPKDEGLCSANVTRYYFNPRYRTCDAFTYTGCGGNDNNFVSREDCKRACAKALKKKKKMPKLRFASRIRKIRKKQF

SEQ ID NO: 106 - protein, 55 aa, Bos taurus
  BPTI 5L15 K-1
APDFCLEPPYDGPCRALHLRYFYNAKAGLCQTFYYGGCLAKRNNFESAEDCMRTC

SEQ ID NO: 107 - protein, 245 aa, Homo sapiens
  Chymotrypsinogen B mature
CGVPAIHPVLSGLSRIVNGEDAVPGSWPWQVSLQDKTGFHFCGGSLISEDWVVTAAHCGVRTSDVVVAGEFDQGSDEENIQVLKIAKVFKNPKFSILTVNNDITLLKLATPARFSQTVSAVCLPSADDDFPAGTLCATTGWGKTKYNANKTPDKLQQAALPLLSNAECKKSWGRRITDVMICAGASGVSSCMGDSGGPLVCQKDGAWTLVGIVSWGSDTCSTSSPGVYARVTKLIPWVQKILAAN

SEQ ID NO: 108 - DNA, 3141 bp, Homo sapiens
  FVII transcript variant 1
agtcccatggggaatgtcaacaggcaggggcagcactgcagagatttcatcatggtctcccaggccctcaggctcctctgccttctgcttgggcttcagggctgcctggctgcaggcggggtcgctaaggcctcaggaggagaaacacgggacatgccgtggaagccggggcctcacagagtcttcgtaacccaggaggaagcccacggcgtcctgcaccggcgccggcgcgccaacgcgttcctggaggagctgcggccgggctccctggagagggagtgcaaggaggagcagtgctccttcgaggaggcccgggagatcttcaaggacgcggagaggacgaagctgttctggatttcttacagtgatggggaccagtgtgcctcaagtccatgccagaatgggggctcctgcaaggaccagctccagtcctatatctgcttctgcctccctgccttcgagggccggaactgtgagacgcacaaggatgaccagctgatctgtgtgaacgagaacggcggctgtgagcagtactgcagtgaccacacgggcaccaagcgctcctgtcggtgccacgaggggtactctctgctggcagacggggtgtcctgcacacccacagttgaatatccatgtggaaaaatacctattctagaaaaaagaaatgccagcaaaccccaaggccgaattgtggggggcaaggtgtgccccaaaggggagtgtccatggcaggtcctgttgttggtgaatggagctcagttgtgtggggggaccctgatcaacaccatctgggtggtctccgcggcccactgtttcgacaaaatcaagaactggaggaacctgatcgcggtgctgggcgagcacgacctcagcgagcacgacggggatgagcagagccggcgggtggcgcaggtcatcatccccagcacgtacgtcccgggcaccaccaaccacgacatcgcgctgctccgcctgcaccagcccgtggtcctcactgaccatgtggtgcccctctgcctgcccgaacggacgttctctgagaggacgctggccttcgtgcgcttctcattggtcagcggctggggccagctgctggaccgtggcgccacggccctggagctcatggtcctcaacgtgccccggctgatgacccaggactgcctgcagcagtcacggaaggtgggagactccccaaatatcacggagtacatgttctgtgccggctactcggatggcagcaaggactcctgcaagggggacagtggaggcccacatgccacccactaccggggcacgtggtacctgacgggcatcgtcagctggggccagggctgcgcaaccgtgggccactttggggtgtacaccagggtctcccagtacatcgagtggctgcaaaagctcatgcgctcagagccacgcccaggagtcctcctgcgagccccatttccctagcccagcagccctggcctgtggagagaaagccaaggctgcgtcgaactgtcctggcaccaaatcccatatattcttctgcagttaatggggtagaggagggcatgggagggagggagaggtggggagggagacagagacagaaacagagagagacagagacagagagagactgagggagagactctgaggacatggagagagactcaaagagactccaagattcaaagagactaatagagacacagagatggaatagaaaagatgagaggcagaggcagacaggcgctggacagaggggcaggggagtgccaaggttgtcctggaggcagacagcccagctgagcctccttacctcccttcagccaagcccacctgcacgtgatctgctggcctcaggctgctgctctgccttcattgctggagacagtagaggcatgaacacacatggatgcacacacacacacgccaatgcacacacacagagatatgcacacacacggatgcacacacagatggtcacacagagatacgcaaacacaccgatgcacacgcacatagagatatgcacacacagatgcacacacagatatacacatggatgcacgcacatgccaatgcacgcacacatcagtgcacacggatgcacagagatatgcacacaccgatgtgcgcacacacagatatgcacacacatggatgagcacacacacaccaatgcgcacacacaccgatgtacacacacagatgcacacacagatgcacacacaccgatgctgactccatgtgtgctgtcctctgaaggcggttgtttagctctcacttttctggttcttatccattatcatcttcacttcagacaattcagaagcatcaccatgcatggtggcgaatgcccccaaactctcccccaaatgtatttctcccttcgctgggtgccgggctgcacagactattccccacctgcttcccagcttcacaataaacggctgcgtctcctccgcacacctgtggtgcctgccacccactgggttgcccatgattcatttttggagcccccggtgctcatcctctgagatgctcttttctttcacaattttcaacatcactgaaatgaaccctcacatggaagctattttttaaaaacaaaagctgtttgatagatgtttgaggctgtagctcccaggatcctgtggaattggatgttctctccctgccacagcccttgtcaatgatatttcacagagaccctgggagcacctgctcaagagtcagggacacacgcatcactaaatgcaagttcccaggccctggctgcagtgggaggacctggcaagctgcactcttgctgagtccccagggtggtggaagaagaatgagaaacacatgaacagagaaatggggaggtgacaaacagtgcccccactcagactccggcaagcacggctcagagagtggactcgatgccatccctgcagggccgtcctgggcaccactggcactcacagcagcaaggtgggcaccattggcactcacagcagcaaggcaggcaccagcaacccacctcgggggcactcaggcatcatctacttcagagcagacagggtctatgaactacagccgtgggctgcttccaaggcaccctgctcttgtaaataaagttttatgggaacacaaaaaaaaaaaaaaaaa

SEQ ID NO: 109 - DNA, 3075 bp, Homo sapiens
  FVII transcript variant 2
agtcccatggggaatgtcaacaggcaggggcagcactgcagagatttcatcatggtctcccaggccctcaggctcctctgccttctgcttgggcttcagggctgcctggctgcagtcttcgtaacccaggaggaagcccacggcgtcctgcaccggcgccggcgcgccaacgcgttcctggaggagctgcggccgggctccctggagagggagtgcaaggaggagcagtgctccttcgaggaggcccgggagatcttcaaggacgcggagaggacgaagctgttctggatttcttacagtgatggggaccagtgtgcctcaagtccatgccagaatgggggctcctgcaaggaccagctccagtcctatatctgcttctgcctccctgccttcgagggccggaactgtgagacgcacaaggatgaccagctgatctgtgtgaacgagaacggcggctgtgagcagtactgcagtgaccacacgggcaccaagcgctcctgtcggtgccacgaggggtactctctgctggcagacggggtgtcctgcacacccacagttgaatatccatgtggaaaaatacctattctagaaaaaagaaatgccagcaaaccccaaggccgaattgtggggggcaaggtgtgccccaaaggggagtgtccatggcaggtcctgttgttggtgaatggagctcagttgtgtggggggaccctgatcaacaccatctgggtggtctccgcggcccactgtttcgacaaaatcaagaactggaggaacctgatcgcggtgctgggcgagcacgacctcagcgagcacgacggggatgagcagagccggcgggtggcgcaggtcatcatccccagcacgtacgtcccgggcaccaccaaccacgacatcgcgctgctccgcctgcaccagcccgtggtcctcactgaccatgtggtgcccctctgcctgcccgaacggacgttctctgagaggacgctggccttcgtgcgcttctcattggtcagcggctggggccagctgctggaccgtggcgccacggccctggagctcatggtcctcaacgtgccccggctgatgacccaggactgcctgcagcagtcacggaaggtgggagactccccaaatatcacggagtacatgttctgtgccggctactcggatggcagcaaggactcctgcaagggggacagtggaggcccacatgccacccactaccggggcacgtggtacctgacgggcatcgtcagctggggccagggctgcgcaaccgtgggccactttggggtgtacaccagggtctcccagtacatcgagtggctgcaaaagctcatgcgctcagagccacgcccaggagtcctcctgcgagccccatttccctagcccagcagccctggcctgtggagagaaagccaaggctgcgtcgaactgtcctggcaccaaatcccatatattcttctgcagttaatggggtagaggagggcatgggagggagggagaggtggggagggagacagagacagaaacagagagagacagagacagagagagactgagggagagactctgaggacatggagagagactcaaagagactccaagattcaaagagactaatagagacacagagatggaatagaaaagatgagaggcagaggcagacaggcgctggacagaggggcaggggagtgccaaggttgtcctggaggcagacagcccagctgagcctccttacctcccttcagccaagcccacctgcacgtgatctgctggcctcaggctgctgctctgccttcattgctggagacagtagaggcatgaacacacatggatgcacacacacacacgccaatgcacacacacagagatatgcacacacacggatgcacacacagatggtcacacagagatacgcaaacacaccgatgcacacgcacatagagatatgcacacacagatgcacacacagatatacacatggatgcacgcacatgccaatgcacgcacacatcagtgcacacggatgcacagagatatgcacacaccgatgtgcgcacacacagatatgcacacacatggatgagcacacacacaccaatgcgcacacacaccgatgtacacacacagatgcacacacagatgcacacacaccgatgctgactccatgtgtgctgtcctctgaaggcggttgtttagctctcacttttctggttcttatccattatcatcttcacttcagacaattcagaagcatcaccatgcatggtggcgaatgcccccaaactctcccccaaatgtatttctcccttcgctgggtgccgggctgcacagactattccccacctgcttcccagcttcacaataaacggctgcgtctcctccgcacacctgtggtgcctgccacccactgggttgcccatgattcatttttggagcccccggtgctcatcctctgagatgctcttttctttcacaattttcaacatcactgaaatgaaccctcacatggaagctattttttaaaaacaaaagctgtttgatagatgtttgaggctgtagctcccaggatcctgtggaattggatgttctctccctgccacagcccttgtcaatgatatttcacagagaccctgggagcacctgctcaagagtcagggacacacgcatcactaaatgcaagttcccaggccctggctgcagtgggaggacctggcaagctgcactcttgctgagtccccagggtggtggaagaagaatgagaaacacatgaacagagaaatggggaggtgacaaacagtgcccccactcagactccggcaagcacggctcagagagtggactcgatgccatccctgcagggccgtcctgggcaccactggcactcacagcagcaaggtgggcaccattggcactcacagcagcaaggcaggcaccagcaacccacctcgggggcactcaggcatcatctacttcagagcagacagggtctatgaactacagccgtgggctgcttccaaggcaccctgctcttgtaaataaagttttatgggaacacaaaaaaaaaaaaaaaaa

SEQ ID NO: 110 - protein, 46 aa, Homo sapiens
  factor IX Gla domain
YNSGKLEEFVQGNLERECMEEKCSFEEAREVFENTERTTEFWKQYV

SEQ ID NO: 111 - protein, 45 aa, Homo sapiens
  factor X Gla domain
ANSFLEEMKKGHLERECMEETCSYEEAREVFEDSDKTNEFWNKYK

SEQ ID NO: 112 - protein, 46 aa, Homo sapiens
  prothrombin/thrombin Gla domain
ANTFLEEVRKGNLERECVEETCSYEEAFEALESSTATDVFWAKYTA

SEQ ID NO: 113 - protein, 46 aa, Homo sapiens
  protein C Gla domain
ANSFLEELRHSSLERECIEEICDFEEAKEIFQNVDDTLAFWSKHVD

SEQ ID NO: 114 - protein, 46 aa, Homo sapiens
  protein S Gla domain
ANSLLEETKQGNLERECIEELCNKEEAREVFENDPETDYFYPKYLV

SEQ ID NO: 115 - protein, 47 aa, Homo sapiens
  osteocalcin (bone Gla protein) Gla domain
YLYQWLGAPVPYPDPLEPRREVCELNPDCDELADHIGFQEAYRRFYG

SEQ ID NO: 116 - protein, 47 aa, Homo sapiens
  matrix Gla protein Gla domain
RAKVQERIRERSKPVHELNREACDDYRLCERYAMVYGYNAAYNRYFR

SEQ ID NO: 117 - protein, 42 aa, Homo sapiens
  growth-arrest-specific protein 6 Gla domain
FEEAKQGHLERECVEELCSREEAREVFENDPETDYFYPRYLD

SEQ ID NO: 118 - protein, 46 aa, Homo sapiens
  protein Z Gla domain
AGSYLLEELFEGNLEKECYEEICVYEEAREVFENEVVTDEFWRRYK

SEQ ID NO: 119 - protein, 45 aa, Homo sapiens
  factor VII Gla domain
ANAFLEELRPGSLERECKEEQCSFEEAREIFKDAERTKLFWISYS

SEQ ID NO: 120 - protein, 40 aa, Notechis scutatus scutatus
  Venom coagulation factor Xa-like protease - Gla domain
  UNSURE (0)...(0): Xaa could be any amino acid
SNSLFEEIRPGNIERECIEEKCSKEEAREVFEDNEKTXXF

SEQ ID NO: 121 - protein, 46 aa, Tropidechis carinatus
  Venom coagulation factor Xa-like protease - Gla domain
SNSLFEEIRPGNIERECIEEKCSKEEAREVFEDNEKTETFWNVYVD

SEQ ID NO: 122 - protein, 464 aa, Homo sapiens
  Antithrombin III precursor
MYSNVIGTVTSGKRKVYLLSLLLIGFWDCVTCHGSPVDICTAKPRDIPMNPMCIYRSPEKKATEDEGSEQKIPEATNRRVWELSKANSRFATTFYQHLADSKNDNDNIFLSPLSISTAFAMTKLGACNDTLQQLMEVFKFDTISEKTSDQIHFFFAKLNCRLYRKANKSSKLVSANRLFGDKSLTFNETYQDISELVYGAKLQPLDFKENAEQSRAAINKWVSNKTEGRITDVIPSEAINELTVLVLVNTIYFKGLWKSKFSPENTRKELFYKADGESCSASMMYQEGKFRYRRVAEGTQVLELPFKGDDITMVLILPKPEKSLAKVEKELTPEVLQEWLDELEEMMLVVHMPRFRIEDGFSLKEQLQDMGLVDLFSPEKSKLPGIVAEGRDDLYVSDAFHKAFLEVNEEGSEAAASTAVVIAGRSLNPNRVTFKANRPFLVFIREVPLNTIIFMGRVANPCVK

SEQ ID NO: 123 - protein, 432 aa, Homo sapiens [sequence omitted]

SEQ ID NO: 124 - protein, 263 aa, Homo sapiens
  THIOLEST (0)...(0): Mature tissue factor
SGTTNTVAAYNLTWKSTNFKTILEWEPKPVNQVYTVQISTKSGDWKSKCFYTTDTECDLTDEIVKDVKQTYLARVFSYPAGNVESTGSAGEPLYENSPEFTPYLETNLGQPTIQSFEQVGTKVNVTVEDERTLVRRNNTFLSLRDVFGKDLIYTLYYWKSSSSGKKTAKTNTNEFLIDVDKGENYCFSVQAVIPSRTVNRKSTDSPVECMGQEKGEFREIFYIIGAVVFVVIILVIILAISLHKCRKAGVGQSWKENSPLNVS

SEQ ID NO: 125 - protein, 406 aa, Homo sapiens
  Factor VIIa variant D60Y
ANAFLEELRPGSLERECKEEQCSFEEAREIFKDAERTKLFWISYSDGDQCASSPCQNGGSCKDQLQSYICFCLPAFEGRNCETHKDDQLICVNENGGCEQYCSDHTGTKRSCRCHEGYSLLADGVSCTPTVEYPCGKIPILEKRNASKPQGRIVGGKVCPKGECPWQVLLLVNGAQLCGGTLINTIWVVSAAHCFYKIKNWRNLIAVLGEHDLSEHDGDEQSRRVAQVIIPSTYVPGTTNHDIALLRLHQPVVLTDHVVPLCLPERTFSERTLAFVRFSLVSGWGQLLDRGATALELMVLNVPRLMTQDCLQQSRKVGDSPNITEYMFCAGYSDGSKDSCKGDSGGPHATHYRGTWYLTGIVSWGQGCATVGHFGVYTRVSQYIEWLQKLMRSEPRPGVLLRAPFP

SEQ ID NO: 126 - protein, 406 aa, Homo sapiens
  Factor VIIa variant D60F
ANAFLEELRPGSLERECKEEQCSFEEAREIFKDAERTKLFWISYSDGDQCASSPCQNGGSCKDQLQSYICFCLPAFEGRNCETHKDDQLICVNENGGCEQYCSDHTGTKRSCRCHEGYSLLADGVSCTPTVEYPCGKIPILEKRNASKPQGRIVGGKVCPKGECPWQVLLLVNGAQLCGGTLINTIWVVSAAHCFFKIKNWRNLIAVLGEHDLSEHDGDEQSRRVAQVIIPSTYVPGTTNHDIALLRLHQPVVLTDHVVPLCLPERTFSERTLAFVRFSLVSGWGQLLDRGATALELMVLNVPRLMTQDCLQQSRKVGDSPNITEYMFCAGYSDGSKDSCKGDSGGPHATHYRGTWYLTGIVSWGQGCATVGHFGVYTRVSQYIEWLQKLMRSEPRPGVLLRAPFP

SEQ ID NO: 127 - protein, 406 aa, Homo sapiens
  Factor VIIa variant D60W
ANAFLEELRPGSLERECKEEQCSFEEAREIFKDAERTKLFWISYSDGDQCASSPCQNGGSCKDQLQSYICFCLPAFEGRNCETHKDDQLICVNENGGCEQYCSDHTGTKRSCRCHEGYSLLADGVSCTPTVEYPCGKIPILEKRNASKPQGRIVGGKVCPKGECPWQVLLLVNGAQLCGGTLINTIWVVSAAHCFWKIKNWRNLIAVLGEHDLSEHDGDEQSRRVAQVIIPSTYVPGTTNHDIALLRLHQPVVLTDHVVPLCLPERTFSERTLAFVRFSLVSGWGQLLDRGATALELMVLNVPRLMTQDCLQQSRKVGDSPNITEYMFCAGYSDGSKDSCKGDSGGPHATHYRGTWYLTGIVSWGQGCATVGHFGVYTRVSQYIEWLQKLMRSEPRPGVLLRAPFP

SEQ ID NO: 128 - protein, 406 aa, Homno sapiens
  Factor VIIa variant D60L
ANAFLEELRPGSLERECKEEQCSFEEAREIFKDAERTKLFWISYSDGDQCASSPCQNGGSCKDQLQSYICFCLPAFEGRNCETHKDDQLICVNENGGCEQYCSDHTGTKRSCRCHEGYSLLADGVSCTPTVEYPCGKIPILEKRNASKPQGRIVGGKVCPKGECPWQVLLLVNGAQLCGGTLINTIWVVSAAHCFLKIKNWRNLIAVLGEHDLSEHDGDEQSRRVAQVIIPSTYVPGTTNHDIALLRLHQPVVLTDHVVPLCLPERTFSERTLAFVRFSLVSGWGQLLDRGATALELMVLNVPRLMTQDCLQQSRKVGDSPNITEYMFCAGYSDGSKDSCKGDSGGPHATHYRGTWYLTGIVSWGQGCATVGHFGVYTRVSQYIEWLQKLMRSEPRPGVLLRAPFP

SEQ ID NO: 129 - protein, 406 aa, Homo sapiens
  Factor VIIa variant D60I
ANAFLEELRPGSLERECKEEQCSFEEAREIFKDAERTKLFWISYSDGDQCASSPCQNGGSCKDQLQSYICFCLPAFEGRNCETHKDDQLICVNENGGCEQYCSDHTGTKRSCRCHEGYSLLADGVSCTPTVEYPCGKIPILEKRNASKPQGRIVGGKVCPKGECPWQVLLLVNGAQLCGGTLINTIWVVSAAHCFIKIKNWRNLIAVLGEHDLSEHDGDEQSRRVAQVIIPSTYVPGTTNHDIALLRLHQPVVLTDHVVPLCLPERTFSERTLAFVRFSLVSGWGQLLDRGATALELMVLNVPRLMTQDCLQQSRKVGDSPNITEYMFCAGYSDGSKDSCKGDSGGPHATHYRGTWYLTGIVSWGQGCATVGHFGVYTRVSQYIEWLQKLMRSEPRPGVLLRAPFP

SEQ ID NO: 130 - protein, 406 aa, Homo sapiens
  Factor VIIa variant K60aI
ANAFLEELRPGSLERECKEEQCSFEEAREIFKDAERTKLFWISYSDGDQCASSPCQNGGSCKDQLQSYICFCLPAFEGRNCETHKDDQLICVNENGGCEQYCSDHTGTKRSCRCHEGYSLLADGVSCTPTVEYPCGKIPILEKRNASKPQGRIVGGKVCPKGECPWQVLLLVNGAQLCGGTLINTIWVVSAAHCFDIIKNWRNLIAVLGEHDLSEHDGDEQSRRVAQVIIPSTYVPGTTNHDIALLRLHQPVVLTDHVVPLCLPERTFSERTLAFVRFSLVSGWGQLLDRGATALELMVLNVPRLMTQDCLQQSRKVGDSPNITEYMFCAGYSDGSKDSCKGDSGGPHATHYRGTWYLTGIVSWGQGCATVGHFGVYTRVSQYIEWLQKLMRSEPRPGVLLRAPFP

SEQ ID NO: 131 - protein, 406 aa, Homo sapiens
  Factor VIIa variant K60aV
ANAFLEELRPGSLERECKEEQCSFEEAREIFKDAERTKLFWISYSDGDQCASSPCQNGGSCKDQLQSYICFCLPAFEGRNCETHKDDQLICVNENGGCEQYCSDHTGTKRSCRCHEGYSLLADGVSCTPTVEYPCGKIPILEKRNASKPQGRIVGGKVCPKGECPWQVLLLVNGAQLCGGTLINTIWVVSAAHCFDVIKNWRNLIAVLGEHDLSEHDGDEQSRRVAQVIIPSTYVPGTTNHDIALLRLHQPVVLTDHVVPLCLPERTFSERTLAFVRFSLVSGWGQLLDRGATALELMVLNVPRLMTQDCLQQSRKVGDSPNITEYMFCAGYSDGSKDSCKGDSGGPHATHYRGTWYLTGIVSWGQGCATVGHFGVYTRVSQYIEWLQKLMRSEPRPGVLLRAPFP

SEQ ID NO: 132 - protein, 406 aa, Homo sapiens
  Factor VIIa variant K60aF
ANAFLEELRPGSLERECKEEQCSFEEAREIFKDAERTKLFWISYSDGDQCASSPCQNGGSCKDQLQSYICFCLPAFEGRNCETHKDDQLICVNENGGCEQYCSDHTGTKRSCRCHEGYSLLADGVSCTPTVEYPCGKIPILEKRNASKPQGRIVGGKVCPKGECPWQVLLLVNGAQLCGGTLINTIWVVSAAHCFDFIKNWRNLIAVLGEHDLSEHDGDEQSRRVAQVIIPSTYVPGTTNHDIALLRLHQPVVLTDHVVPLCLPERTFSERTLAFVRFSLVSGWGQLLDRGATALELMVLNVPRLMTQDCLQQSRKVGDSPNITEYMFCAGYSDGSKDSCKGDSGGPHATHYRGTWYLTGIVSWGQGCATVGHFGVYTRVSQYIEWLQKLMRSEPRPGVLLRAPFP

SEQ ID NO: 133 - protein, 406 aa, Homo sapiens
  Factor VIIa variant K60aW
ANAFLEELRPGSLERECKEEQCSFEEAREIFKDAERTKLFWISYSDGDQCASSPCQNGGSCKDQLQSYICFCLPAFEGRNCETHKDDQLICVNENGGCEQYCSDHTGTKRSCRCHEGYSLLADGVSCTPTVEYPCGKIPILEKRNASKPQGRIVGGKVCPKGECPWQVLLLVNGAQLCGGTLINTIWVVSAAHCFDWIKNWRNLIAVLGEHDLSEHDGDEQSRRVAQVIIPSTYVPGTTNHDIALLRLHQPVVLTDHVVPLCLPERTFSERTLAFVRFSLVSGWGQLLDRGATALELMVLNVPRLMTQDCLQQSRKVGDSPNITEYMFCAGYSDGSKDSCKGDSGGPHATHYRGTWYLTGIVSWGQGCATVGHFGVYTRVSQYIEWLQKLMRSEPRPGVLLRAPFP

SEQ ID NO: 134 - protein, 406 aa, Homo sapiens
  Factor VIIa variant G97W
ANAFLEELRPGSLERECKEEQCSFEEAREIFKDAERTKLFWISYSDGDQCASSPCQNGGSCKDQLQSYICFCLPAFEGRNCETHKDDQLICVNENGGCEQYCSDHTGTKRSCRCHEGYSLLADGVSCTPTVEYPCGKIPILEKRNASKPQGRIVGGKVCPKGECPWQVLLLVNGAQLCGGTLINTIWVVSAAHCFDKIKNWRNLIAVLGEHDLSEHDGDEQSRRVAQVIIPSTYVPWTTNHDIALLRLHQPVVLTDHVVPLCLPERTFSERTLAFVRFSLVSGWGQLLDRGATALELMVLNVPRLMTQDCLQQSRKVGDSPNITEYMFCAGYSDGSKDSCKGDSGGPHATHYRGTWYLTGIVSWGQGCATVGHFGVYTRVSQYIEWLQKLMRSEPRPGVLLRAPFP

SEQ ID NO: 135 - protein, 406 aa, Homo sapiens
  Factor VIIa variant G97T
ANAFLEELRPGSLERECKEEQCSFEEAREIFKDAERTKLFWISYSDGDQCASSPCQNGGSCKDQLQSYICFCLPAFEGRNCETHKDDQLICVNENGGCEQYCSDHTGTKRSCRCHEGYSLLADGVSCTPTVEYPCGKIPILEKRNASKPQGRIVGGKVCPKGECPWQVLLLVNGAQLCGGTLINTIWVVSAAHCFDKIKNWRNLIAVLGEHDLSEHDGDEQSRRVAQVIIPSTYVPTTTNHDIALLRLHQPVVLTDHVVPLCLPERTFSERTLAFVRFSLVSGWGQLLDRGATALELMVLNVPRLMTQDCLQQSRKVGDSPNITEYMFCAGYSDGSKDSCKGDSGGPHATHYRGTWYLTGIVSWGQGCATVGHFGVYTRVSQYIEWLQKLMRSEPRPGVLLRAPFP

SEQ ID NO: 136 - protein, 406 aa, Homo sapiens
  Factor VIIa variant G97I
ANAFLEELRPGSLERECKEEQCSFEEAREIFKDAERTKLFWISYSDGDQCASSPCQNGGSCKDQLQSYICFCLPAFEGRNCETHKDDQLICVNENGGCEQYCSDHTGTKRSCRCHEGYSLLADGVSCTPTVEYPCGKIPILEKRNASKPQGRIVGGKVCPKGECPWQVLLLVNGAQLCGGTLINTIWVVSAAHCFDKIKNWRNLIAVLGEHDLSEHDGDEQSRRVAQVIIPSTYVPITTNHDIALLRLHQPVVLTDHVVPLCLPERTFSERTLAFVRFSLVSGWGQLLDRGATALELMVLNVPRLMTQDCLQQSRKVGDSPNITEYMFCAGYSDGSKDSCKGDSGGPHATHYRGTWYLTGIVSWGQGCATVGHFGVYTRVSQYIEWLQKLMRSEPRPGVLLRAPFP

SEQ ID NO: 137 - protein, 406 aa, Homo sapiens
  Factor VIIa variant G97V
ANAFLEELRPGSLERECKEEQCSFEEAREIFKDAERTKLFWISYSDGDQCASSPCQNGGSCKDQLQSYICFCLPAFEGRNCETHKDDQLICVNENGGCEQYCSDHTGTKRSCRCHEGYSLLADGVSCTPTVEYPCGKIPILEKRNASKPQGRIVGGKVCPKGECPWQVLLLVNGAQLCGGTLINTIWVVSAAHCFDKIKNWRNLIAVLGEHDLSEHDGDEQSRRVAQVIIPSTYVPVTTNHDIALLRLHQPVVLTDHVVPLCLPERTFSERTLAFVRFSLVSGWGQLLDRGATALELMVLNVPRLMTQDCLQQSRKVGDSPNITEYMFCAGYSDGSKDSCKGDSGGPHATHYRGTWYLTGIVSWGQGCATVGHFGVYTRVSQYIEWLQKLMRSEPRPGVLLRAPFP

SEQ ID NO: 138 - protein, 406 aa, Homo sapiens
  Factor VIIa variant K192Q
ANAFLEELRPGSLERECKEEQCSFEEAREIFKDAERTKLFWISYSDGDQCASSPCQNGGSCKDQLQSYICFCLPAFEGRNCETHKDDQLICVNENGGCEQYCSDHTGTKRSCRCHEGYSLLADGVSCTPTVEYPCGKIPILEKRNASKPQGRIVGGKVCPKGECPWQVLLLVNGAQLCGGTLINTIWVVSAAHCFDKIKNWRNLIAVLGEHDLSEHDGDEQSRRVAQVIIPSTYVPGTTNHDIALLRLHQPVVLTDHVVPLCLPERTFSERTLAFVRFSLVSGWGQLLDRGATALELMVLNVPRLMTQDCLQQSRKVGDSPNITEYMFCAGYSDGSKDSCQGDSGGPHATHYRGTWYLTGIVSWGQGCATVGHFGVYTRVSQYIEWLQKLMRSEPRPGVLLRAPFP

SEQ ID NO: 139 - protein, 406 aa, Homo sapiens
  Factor VIIa variant D60K/K60aL
ANAFLEELRPGSLERECKEEQCSFEEAREIFKDAERTKLFWISYSDGDQCASSPCQNGGSCKDQLQSYICFCLPAFEGRNCETHKDDQLICVNENGGCEQYCSDHTGTKRSCRCHEGYSLLADGVSCTPTVEYPCGKIPILEKRNASKPQGRIVGGKVCPKGECPWQVLLLVNGAQLCGGTLINTIWVVSAAHCFKLIKNWRNLIAVLGEHDLSEHDGDEQSRRVAQVIIPSTYVPGTTNHDIALLRLHQPVVLTDHVVPLCLPERTFSERTLAFVRFSLVSGWGQLLDRGATALELMVLNVPRLMTQDCLQQSRKVGDSPNITEYMFCAGYSDGSKDSCKGDSGGPHATHYRGTWYLTGIVSWGQGCATVGHFGVYTRVSQYIEWLQKLMRSEPRPGVLLRAPFP

SEQ ID NO: 140 - protein, 406 aa, Homo sapiens
  Factor VIIa variant D60F/K60aL
ANAFLEELRPGSLERECKEEQCSFEEAREIFKDAERTKLFWISYSDGDQCASSPCQNGGSCKDQLQSYICFCLPAFEGRNCETHKDDQLICVNENGGCEQYCSDHTGTKRSCRCHEGYSLLADGVSCTPTVEYPCGKIPILEKRNASKPQGRIVGGKVCPKGECPWQVLLLVNGAQLCGGTLINTIWVVSAAHCFFLIKNWRNLIAVLGEHDLSEHDGDEQSRRVAQVIIPSTYVPGTTNHDIALLRLHQPVVLTDHVVPLCLPERTFSERTLAFVRFSLVSGWGQLLDRGATALELMVLNVPRLMTQDCLQQSRKVGDSPNITEYMFCAGYSDGSKDSCKGDSGGPHATHYRGTWYLTGIVSWGQGCATVGHFGVYTRVSQYIEWLQKLMRSEPRPGVLLRAPFP

SEQ ID NO: 141 - protein, 406 aa, Homo sapiens
  Factor VIIa variant D60L/K60aL
ANAFLEELRPGSLERECKEEQCSFEEAREIFKDAERTKLFWISYSDGDQCASSPCQNGGSCKDQLQSYICFCLPAFEGRNCETHKDDQLICVNENGGCEQYCSDHTGTKRSCRCHEGYSLLADGVSCTPTVEYPCGKIPILEKRNASKPQGRIVGGKVCPKGECPWQVLLLVNGAQLCGGTLINTIWVVSAAHCFLLIKNWRNLIAVLGEHDLSEHDGDEQSRRVAQVIIPSTYVPGTTNHDIALLRLHQPVVLTDHVVPLCLPERTFSERTLAFVRFSLVSGWGQLLDRGATALELMVLNVPRLMTQDCLQQSRKVGDSPNITEYMFCAGYSDGSKDSCKGDSGGPHATHYRGTWYLTGIVSWGQGCATVGHFGVYTRVSQYIEWLQKLMRSEPRPGVLLRAPFP

SEQ ID NO: 142 - protein, 406 aa, Homo sapiens
  Factor VIIa variant D60M/K60aL
ANAFLEELRPGSLERECKEEQCSFEEAREIFKDAERTKLFWISYSDGDQCASSPCQNGGSCKDQLQSYICFCLPAFEGRNCETHKDDQLICVNENGGCEQYCSDHTGTKRSCRCHEGYSLLADGVSCTPTVEYPCGKIPILEKRNASKPQGRIVGGKVCPKGECPWQVLLLVNGAQLCGGTLINTIWVVSAAHCFMLIKNWRNLIAVLGEHDLSEHDGDEQSRRVAQVIIPSTYVPGTTNHDIALLRLHQPVVLTDHVVPLCLPERTFSERTLAFVRFSLVSGWGQLLDRGATALELMVLNVPRLMTQDCLQQSRKVGDSPNITEYMFCAGYSDGSKDSCKGDSGGPHATHYRGTWYLTGIVSWGQGCATVGHFGVYTRVSQYIEWLQKLMRSEPRPGVLLRAPFP

SEQ ID NO: 143 - protein, 406 aa, Homo sapiens
  Factor VIIa variant D60W/K60aL
ANAFLEELRPGSLERECKEEQCSFEEAREIFKDAERTKLFWISYSDGDQCASSPCQNGGSCKDQLQSYICFCLPAFEGRNCETHKDDQLICVNENGGCEQYCSDHTGTKRSCRCHEGYSLLADGVSCTPTVEYPCGKIPILEKRNASKPQGRIVGGKVCPKGECPWQVLLLVNGAQLCGGTLINTIWVVSAAHCFWLIKNWRNLIAVLGEHDLSEHDGDEQSRRVAQVIIPSTYVPGTTNHDIALLRLHQPVVLTDHVVPLCLPERTFSERTLAFVRFSLVSGWGQLLDRGATALELMVLNVPRLMTQDCLQQSRKVGDSPNITEYMFCAGYSDGSKDSCKGDSGGPHATHYRGTWYLTGIVSWGQGCATVGHFGVYTRVSQYIEWLQKLMRSEPRPGVLLRAPFP

SEQ ID NO: 144 - protein, 406 aa, Homo sapiens
  Factor VIIa variant D60F/K60aE
ANAFLEELRPGSLERECKEEQCSFEEAREIFKDAERTKLFWISYSDGDQCASSPCQNGGSCKDQLQSYICFCLPAFEGRNCETHKDDQLICVNENGGCEQYCSDHTGTKRSCRCHEGYSLLADGVSCTPTVEYPCGKIPILEKRNASKPQGRIVGGKVCPKGECPWQVLLLVNGAQLCGGTLINTIWVVSAAHCFFEIKNWRNLIAVLGEHDLSEHDGDEQSRRVAQVIIPSTYVPGTTNHDIALLRLHQPVVLTDHVVPLCLPERTFSERTLAFVRFSLVSGWGQLLDRGATALELMVLNVPRLMTQDCLQQSRKVGDSPNITEYMFCAGYSDGSKDSCKGDSGGPHATHYRGTWYLTGIVSWGQGCATVGHFGVYTRVSQYIEWLQKLMRSEPRPGVLLRAPFP

SEQ ID NO: 145 - protein, 406 aa, Homo sapiens
  Factor VIIa variant D60W/K60aE
ANAFLEELRPGSLERECKEEQCSFEEAREIFKDAERTKLFWISYSDGDQCASSPCQNGGSCKDQLQSYICFCLPAFEGRNCETHKDDQLICVNENGGCEQYCSDHTGTKRSCRCHEGYSLLADGVSCTPTVEYPCGKIPILEKRNASKPQGRIVGGKVCPKGECPWQVLLLVNGAQLCGGTLINTIWVVSAAHCFWEIKNWRNLIAVLGEHDLSEHDGDEQSRRVAQVIIPSTYVPGTTNHDIALLRLHQPVVLTDHVVPLCLPERTFSERTLAFVRFSLVSGWGQLLDRGATALELMVLNVPRLMTQDCLQQSRKVGDSPNITEYMFCAGYSDGSKDSCKGDSGGPHATHYRGTWYLTGIVSWGQGCATVGHFGVYTRVSQYIEWLQKLMRSEPRPGVLLRAPFP

SEQ ID NO: 146 - protein, 406 aa, Homo sapiens
  Factor VIIa variant D60V/K60aE
ANAFLEELRPGSLERECKEEQCSFEEAREIFKDAERTKLFWISYSDGDQCASSPCQNGGSCKDQLQSYICFCLPAFEGRNCETHKDDQLICVNENGGCEQYCSDHTGTKRSCRCHEGYSLLADGVSCTPTVEYPCGKIPILEKRNASKPQGRIVGGKVCPKGECPWQVLLLVNGAQLCGGTLINTIWVVSAAHCFVEIKNWRNLIAVLGEHDLSEHDGDEQSRRVAQVIIPSTYVPGTTNHDIALLRLHQPVVLTDHVVPLCLPERTFSERTLAFVRFSLVSGWGQLLDRGATALELMVLNVPRLMTQDCLQQSRKVGDSPNITEYMFCAGYSDGSKDSCKGDSGGPHATHYRGTWYLTGIVSWGQGCATVGHFGVYTRVSQYIEWLQKLMRSEPRPGVLLRAPFP

SEQ ID NO: 147 - protein, 406 aa, Homo sapiens
  Factor VIIa variant L163V/S170bE/K188A/F225Y
ANAFLEELRPGSLERECKEEQCSFEEAREIFKDAERTKLFWISYSDGDQCASSPCQNGGSCKDQLQSYICFCLPAFEGRNCETHKDDQLICVNENGGCEQYCSDHTGTKRSCRCHEGYSLLADGVSCTPTVEYPCGKIPILEKRNASKPQGRIVGGKVCPKGECPWQVLLLVNGAQLCGGTLINTIWVVSAAHCFDKIKNWRNLIAVLGEHDLSEHDGDEQSRRVAQVIIPSTYVPGTTNHDIALLRLHQPVVLTDHVVPLCLPERTFSERTLAFVRFSLVSGWGQLLDRGATALELMVLNVPRVMTQDCLQQERKVGDSPNITEYMFCAGYSDGSADSCKGDSGGPHATHYRGTWYLTGIVSWGQGCATVGHYGVYTRVSQYIEWLQKLMRSEPRPGVLLRAPFP

SEQ ID NO: 148 - protein, 406 aa, Homo sapiens
  Factor VIIa variant M156Q
ANAFLEELRPGSLERECKEEQCSFEEAREIFKDAERTKLFWISYSDGDQCASSPCQNGGSCKDQLQSYICFCLPAFEGRNCETHKDDQLICVNENGGCEQYCSDHTGTKRSCRCHEGYSLLADGVSCTPTVEYPCGKIPILEKRNASKPQGRIVGGKVCPKGECPWQVLLLVNGAQLCGGTLINTIWVVSAAHCFDKIKNWRNLIAVLGEHDLSEHDGDEQSRRVAQVIIPSTYVPGTTNHDIALLRLHQPVVLTDHVVPLCLPERTFSERTLAFVRFSLVSGWGQLLDRGATALELQVLNVPRLMTQDCLQQSRKVGDSPNITEYMFCAGYSDGSKDSCKGDSGGPHATHYRGTWYLTGIVSWGQGCATVGHFGVYTRVSQYIEWLQKLMRSEPRPGVLLRAPFP

SEQ ID NO: 149 - protein, 406 aa, Homo sapiens
  Factor VIIa variant V21D/E154V/M156Q
ANAFLEELRPGSLERECKEEQCSFEEAREIFKDAERTKLFWISYSDGDQCASSPCQNGGSCKDQLQSYICFCLPAFEGRNCETHKDDQLICVNENGGCEQYCSDHTGTKRSCRCHEGYSLLADGVSCTPTVEYPCGKIPILEKRNASKPQGRIVGGKDCPKGECPWQVLLLVNGAQLCGGTLINTIWVVSAAHCFDKIKNWRNLIAVLGEHDLSEHDGDEQSRRVAQVIIPSTYVPGTTNHDIALLRLHQPVVLTDHVVPLCLPERTFSERTLAFVRFSLVSGWGQLLDRGATALVLQVLNVPRLMTQDCLQQSRKVGDSPNITEYMFCAGYSDGSKDSCKGDSGGPHATHYRGTWYLTGIVSWGQGCATVGHFGVYTRVSQYIEWLQKLMRSEPRPGVLLRAPFP

SEQ ID NO: 150 - protein, 406 aa, Homo sapiens
  Factor VIIa variant V21D/E154V/M156Q/K188A
ANAFLEELRPGSLERECKEEQCSFEEAREIFKDAERTKLFWISYSDGDQCASSPCQNGGSCKDQLQSYICFCLPAFEGRNCETHKDDQLICVNENGGCEQYCSDHTGTKRSCRCHEGYSLLADGVSCTPTVEYPCGKIPILEKRNASKPQGRIVGGKDCPKGECPWQVLLLVNGAQLCGGTLINTIWVVSAAHCFDKIKNWRNLIAVLGEHDLSEHDGDEQSRRVAQVIIPSTYVPGTTNHDIALLRLHQPVVLTDHVVPLCLPERTFSERTLAFVRFSLVSGWGQLLDRGATALVLQVLNVPRLMTQDCLQQSRKVGDSPNITEYMFCAGYSDGSADSCKGDSGGPHATHYRGTWYLTGIVSWGQGCATVGHFGVYTRVSQYIEWLQKLMRSEPRPGVLLRAPFP

SEQ ID NO: 151 - DNA, 4278 bp, Artificial Sequence
  pCMV Script vector
atgcattagttattaatagtaatcaattacggggtcattagttcatagcccatatatggagttccgcgttacataacttacggtaaatggcccgcctggctgaccgcccaacgacccccgcccattgacgtcaataatgacgtatgttcccatagtaacgccaatagggactttccattgacgtcaatgggtggagtatttacggtaaactgcccacttggcagtacatcaagtgtatcatatgccaagtacgccccctattgacgtcaatgacggtaaatggcccgcctggcattatgcccagtacatgaccttatgggactttcctacttggcagtacatctacgtattagtcatcgctattaccatggtgatgcggttttggcagtacatcaatgggcgtggatagcggtttgactcacggggatttccaagtctccaccccattgacgtcaatgggagtttgttttggcaccaaaatcaacgggactttccaaaatgtcgtaacaactccgccccattgacgcaaatgggcggtaggcgtgtacggtgggaggtctatataagcagagctggtttagtgaaccgtcagatccgctagcgattacgccaagctcgaaattaaccctcactaaagggaacaaaagctggagctccaccgcggtggcggccgctctagcccgggcggatcccccgggctgcaggaattcgatatcaagcttatcgataccgtcgacctcgagggggggcccggtaccaggtaagtgtacccaattcgccctatagtgagtcgtattacaattcactcgatcgcccttcccaacagttgcgcagcctgaatggcgaatggagatccaatttttaagtgtataatgtgttaaactactgattctaattgtttgtgtattttagattcacagtcccaaggctcatttcaggcccctcagtcctcacagtctgttcatgatcataatcagccataccacatttgtagaggttttacttgctttaaaaaacctcccacacctccccctgaacctgaaacataaaatgaatgcaattgttgttgttaacttgtttattgcagcttataatggttacaaataaagcaatagcatcacaaatttcacaaataaagcatttttttcactgcattctagttgtggtttgtccaaactcatcaatgtatcttaacgcgtaaattgtaagcgttaatattttgttaaaattcgcgttaaatttttgttaaatcagctcattttttaaccaataggccgaaatcggcaaaatcccttataaatcaaaagaatagaccgagatagggttgagtgttgttccagtttggaacaagagtccactattaaagaacgtggactccaacgtcaaagggcgaaaaaccgtctatcagggcgatggcccactacgtgaaccatcaccctaatcaagttttttggggtcgaggtgccgtaaagcactaaatcggaaccctaaagggagcccccgatttagagcttgacggggaaagccggcgaacgtggcgagaaaggaagggaagaaagcgaaaggagcgggcgctagggcgctggcaagtgtagcggtcacgctgcgcgtaaccaccacacccgccgcgcttaatgcgccgctacagggcgcgtcaggtggcacttttcggggaaatgtgcgcggaacccctatttgtttatttttctaaatacattcaaatatgtatccgctcatgagacaataaccctgataaatgcttcaataatattgaaaaaggaagaatcctgaggcggaaagaaccagctgtggaatgtgtgtcagttagggtgtggaaagtccccaggctccccagcaggcagaagtatgcaaagcatgcatctcaattagtcagcaaccaggtgtggaaagtccccaggctccccagcaggcagaagtatgcaaagcatgcatctcaattagtcagcaaccatagtcccgcccctaactccgcccatcccgcccctaactccgcccagttccgcccattctccgccccatggctgactaattttttttatttatgcagaggccgaggccgcctcggcctctgagctattccagaagtagtgaggaggcttttttggaggcctaggcttttgcaaagatcgatcaagagacaggatgaggatcgtttcgcatgattgaacaagatggattgcacgcaggttctccggccgcttgggtggagaggctattcggctatgactgggcacaacagacaatcggctgctctgatgccgccgtgttccggctgtcagcgcaggggcgcccggttctttttgtcaagaccgacctgtccggtgccctgaatgaactgcaagacgaggcagcgcggctatcgtggctggccacgacgggcgttccttgcgcagctgtgctcgacgttgtcactgaagcgggaagggactggctgctattgggcgaagtgccggggcaggatctcctgtcatctcaccttgctcctgccgagaaagtatccatcatggctgatgcaatgcggcggctgcatacgcttgatccggctacctgcccattcgaccaccaagcgaaacatcgcatcgagcgagcacgtactcggatggaagccggtcttgtcgatcaggatgatctggacgaagaacatcaggggctcgcgccagccgaactgttcgccaggctcaaggcgagcatgcccgacggcgaggatctcgtcgtgacccatggcgatgcctgcttgccgaatatcatggtggaaaatggccgcttttctggattcatcgactgtggccggctgggtgtggcggaccgctatcaggacatagcgttggctacccgtgatattgctgaagaacttggcggcgaatgggctgaccgcttcctcgtgctttacggtatcgccgctcccgattcgcagcgcatcgccttctatcgccttcttgacgagttcttctgagcgggactctggggttcgaaatgaccgaccaagcgacgcccaacctgccatcacgagatttcgattccaccgccgccttctatgaaaggttgggcttcggaatcgttttccgggacgccggctggatgatcctccagcgcggggatctcatgctggagttcttcgcccaccctagggggaggctaactgaaacacggaaggagacaataccggaaggaacccgcgctatgacggcaataaaaagacagaataaaacgcacggtgttgggtcgtttgttcataaacgcggggttcggtcccagggctggcactctgtcgataccccaccgagaccccattggggccaatacgcccgcgtttcttccttttccccaccccaccccccaagttcgggtgaaggcccagggctcgcagccaacgtcggggcggcaggccctgccatagcctcaggttactcatatatactttagattgatttaaaacttcatttttaatttaaaaggatctaggtgaagatcctttttgataatctcatgaccaaaatcccttaacgtgagttttcgttccactgagcgtcagaccccgtagaaaagatcaaaggatcttcttgagatcctttttttctgcgcgtaatctgctgcttgcaaacaaaaaaaccaccgctaccagcggtggtttgtttgccggatcaagagctaccaactctttttccgaaggtaactggcttcagcagagcgcagataccaaatactgtccttctagtgtagccgtagttaggccaccacttcaagaactctgtagcaccgcctacatacctcgctctgctaatcctgttaccagtggctgctgccagtggcgataagtcgtgtcttaccgggttggactcaagacgatagttaccggataaggcgcagcggtcgggctgaacggggggttcgtgcacacagcccagcttggagcgaacgacctacaccgaactgagatacctacagcgtgagctatgagaaagcgccacgcttcccgaagggagaaaggcggacaggtatccggtaagcggcagggtcggaacaggagagcgcacgagggagcttccagggggaaacgcctggtatctttatagtcctgtcgggtttcgccacctctgacttgagcgtcgatttttgtgatgctcgtcaggggggcggagcctatggaaaaacgccagcaacgcggcctttttacggttcctggccttttgctggccttttgctcacatgttctttcctgcgttatcccctgattctgtggataaccgtattaccgcc

SEQ ID NO: 152 - DNA, 45 bp, Artificial Sequence
  CBO-125 Factor VII Forward PCR Primer
gcatcatgacgtgacggatccgccaccatggtctcccaggccctc

SEQ ID NO: 153 - DNA, 45 bp, Artificial Sequence
  CBO-126 Factor VII Reverse PCR Primer
gatcgtacgatacgtgaattcctagggaaatggggctcgcaggag

SEQ ID NO: 154 - DNA, 1398 bp, Homo sapiens
  FVII cDNA (template for PCR)
atggtctcccaggccctcaggctcctctgccttctgcttgggcttcagggctgcctggctgcaggcggggtcgctaaggcctcaggaggagaaacacgggacatgccgtggaagccggggcctcacagagtcttcgtaacccaggaggaagcccacggcgtcctgcaccggcgccggcgcgccaacgcgttcctggaggagctgcggccgggctccctggagagggagtgcaaggaggagcagtgctccttcgaggaggcccgggagatcttcaaggacgcggagaggacgaagctgttctggatttcttacagtgatggggaccagtgtgcctcaagtccatgccagaatgggggctcctgcaaggaccagctccagtcctatatctgcttctgcctccctgccttcgagggccggaactgtgagacgcacaaggatgaccagctgatctgtgtgaacgagaacggcggctgtgagcagtactgcagtgaccacacgggcaccaagcgctcctgtcggtgccacgaggggtactctctgctggcagacggggtgtcctgcacacccacagttgaatatccatgtggaaaaatacctattctagaaaaaagaaatgccagcaaaccccaaggccgaattgtggggggcaaggtgtgccccaaaggggagtgtccatggcaggtcctgttgttggtgaatggagctcagttgtgtggggggaccctgatcaacaccatctgggtggtctccgcggcccactgtttcgacaaaatcaagaactggaggaacctgatcgcggtgctgggcgagcacgacctcagcgagcacgacggggatgagcagagccggcgggtggcgcaggtcatcatccccagcacgtacgtcccgggcaccaccaaccacgacatcgcgctgctccgcctgcaccagcccgtggtcctcactgaccatgtggtgcccctctgcctgcccgaacggacgttctctgagaggacgctggccttcgtgcgcttctcattggtcagcggctggggccagctgctggaccgtggcgccacggccctggagctcatggtcctcaacgtgccccggctgatgacccaggactgcctgcagcagtcacggaaggtgggagactccccaaatatcacggagtacatgttctgtgccggctactcggatggcagcaaggactcctgcaagggggacagtggaggcccacatgccacccactaccggggcacgtggtacctgacgggcatcgtcagctggggccagggctgcgcaaccgtgggccactttggggtgtacaccagggtctcccagtacatcgagtggctgcaaaagctcatgcgctcagagccacgcccaggagtcctcctgcgagccccatttccc

SEQ ID NO: 155 - DNA, 33 bp, Artificial Sequence
  D60 wild-type primer
gcggcccactgtttcgacaaaatcaagaactgg

SEQ ID NO: 156 - DNA, 33 bp, Artificial Sequence
  CBO-157 D60K primer
gcggcccactgtttcaagaaaatcaagaactgg

SEQ ID NO: 157 - DNA, 33 bp, Artificial Sequence
  CBO-158 D60R  primer
gcggcccactgtttcaggaaaatcaagaactgg

SEQ ID NO: 158 - DNA, 33 bp, Artificial Sequence
  CBO-159 D60A  primer
gcggcccactgtttcgcgaaaatcaagaactgg

SEQ ID NO: 159 - DNA, 33 bp, Artificial Sequence
  K60a wild-type primer
gcccactgtttcgacaaaatcaagaactggagg

SEQ ID NO: 160 - DNA, 33 bp, Artificial Sequence
  CBO-160 K60aD primer
gcccactgtttcgacgacatcaagaactggagg

SEQ ID NO: 161 - DNA, 33 bp, Artificial Sequence
  CBO-161 K60aE primer
gcccactgtttcgacgagatcaagaactggagg

SEQ ID NO: 162 - DNA, 33 bp, Artificial Sequence
  allele (0)...(0)
  CBO-162 K60aA primer
gcccactgtttcgacgcgatcaagaactggagg

SEQ ID NO: 163 - DNA, 33 bp, Artificial Sequence
  CBO-163 K60aL primer
gcccactgtttcgacctcatcaagaactggagg

SEQ ID NO: 164 - DNA, 33 bp, Artificial Sequence
  CBO-164 K60aY primer
gcccactgtttcgactatatcaagaactggagg

SEQ ID NO: 165 - DNA, 33 bp, Artificial Sequence
  K60c wild-type primer
tgtttcgacaaaatcaagaactggaggaacctg

SEQ ID NO: 166 - DNA, 33 bp, Artificial Sequence
  CBO-165 K60cD primer
tgtttcgacaaaatcgacaactggaggaacctg

SEQ ID NO: 167 - DNA, 33 bp, Artificial Sequence
  CBO-166 K60cE primer
tgtttcgacaaaatcgagaactggaggaacctg

SEQ ID NO: 168 - DNA, 33 bp, Artificial Sequence
  CBO-167 K60cA primer
tgtttcgacaaaatcgcgaactggaggaacctg

SEQ ID NO: 169 - DNA, 33 bp, Artificial Sequence
  T99 wild-type primer
tacgtcccgggcaccaccaaccacgacatcgcg

SEQ ID NO: 170 - DNA, 33 bp, Artificial Sequence
  CBO-168 T99A primer
tacgtcccgggcaccgcgaaccacgacatcgcg

SEQ ID NO: 171 - DNA, 33 bp, Artificial Sequence
  R147 wild-type primer
ggccagctgctggaccgtggcgccacggccctg

SEQ ID NO: 172 - DNA, 33 bp, Artificial Sequence
  CBO-169 R147D primer
ggccagctgctggacgacggcgccacggccctg

SEQ ID NO: 173 - DNA, 33 bp, Artificial Sequence
  CBO-170 R147E primer
ggccagctgctggacgagggcgccacggccctg

SEQ ID NO: 174 - DNA, 33 bp, Artificial Sequence
  CBO-171 R147A primer
ggccagctgctggacgcgggcgccacggccctg

SEQ ID NO: 175 - DNA, 33 bp, Artificial Sequence
  K192 wild-type primer
agcaaggactcctgcaagggggacagtggaggc

SEQ ID NO: 176 - DNA, 33 bp, Artificial Sequence
  CBO-172 K192R primer
agcaaggactcctgccgcggggacagtggaggc

SEQ ID NO: 177 - DNA, 60 bp, Artificial Sequence
  multiple mutants wild-type primer
gtggtctccgcggcccactgtttcgacaaaatcaagaactggaggaacctgatcgcggtg

SEQ ID NO: 178 - DNA, 60 bp, Artificial Sequence
  CBO-177 D60R / K60aE / K60cE primer
gtggtctccgcggcccactgtttcagggagatcgaaaactggaggaacctgatcgcggtg

SEQ ID NO: 179 - DNA, 60 bp, Artificial Sequence
  CBO-178 D60 K K60aE / K60cE primer
gtggtctccgcggcccactgtttcaaggagatcgaaaactggaggaacctgatcgcggtg

SEQ ID NO: 180 - DNA, 60 bp, Artificial Sequence
  CBO-179 D60R / K60aM / K60cE primer
gtggtctccgcggcccactgtttcaggatgatcgaaaactggaggaacctgatcgcggtg

SEQ ID NO: 181 - DNA, 33 bp, Artificial Sequence
  CBOLH-54 K60aI primer
gcccactgtttcgacatcatcaagaactggagg

SEQ ID NO: 182 - DNA, 33 bp, Artificial Sequence
  CBOLH-55 K60aV primer
gcccactgtttcgacgtcatcaagaactggagg

SEQ ID NO: 183 - DNA, 33 bp, Artificial Sequence
  CBOLH-56 K60aF primer
gcccactgtttcgacttcatcaagaactggagg

SEQ ID NO: 184 - DNA, 33 bp, Artificial Sequence
  CBOLH-57 K60aW primer
gcccactgtttcgactggatcaagaactggagg

SEQ ID NO: 185 - DNA, 33 bp, Artificial Sequence
  CBOLH-58 K60aM primer
gcccactgtttcgacatgatcaagaactggagg

SEQ ID NO: 186 - DNA, 33 bp, Artificial Sequence
  CBOLH-59 D60F primer
gcggcccactgtttctttaaaatcaagaactgg

SEQ ID NO: 187 - DNA, 33 bp, Artificial Sequence
  CBOLH-60 D60Y primer
gcggcccactgtttcataaaaatcaagaactgg

SEQ ID NO: 188 - DNA, 33 bp, Artificial Sequence
  CBOLH-61 D60W primer
gcggcccactgtttctggaaaatcaagaactgg

SEQ ID NO: 189 - DNA, 33 bp, Artificial Sequence
  CBOLH-62 D60L primer
gcggcccactgtttcgagaaaatcaagaactgg

SEQ ID NO: 190 - DNA, 33 bp, Artificial Sequence
  CBOLH-63 D60I primer
gcggcccactgtttcatcaaaatcaagaactgg

SEQ ID NO: 191 - DNA, 33 bp, Artificial Sequence
  G97 wild-type primer
agcacgtacgtcccgggcaccaccaaccacgac

SEQ ID NO: 192 - DNA, 33 bp, Artificial Sequence
  CBOLH-64 G97W primer
agcacgtacgtcccgtggaccaccaaccacgac

SEQ ID NO: 193 - DNA, 33 bp, Artificial Sequence
  CBOLH-65 G97T primer
agcacgtacgtcccgacgaccaccaaccacgac

SEQ ID NO: 194 - DNA, 33 bp, Artificial Sequence
  CBOLH-66 G97I primer
agcacgtacgtcccgatcaccaccaaccacgac

SEQ ID NO: 195 - DNA, 33 bp, Artificial Sequence
  CBOLH-67 G97V primer
agcacgtacgtcccggtcaccaccaaccacgac

SEQ ID NO: 196 - DNA, 33 bp, Artificial Sequence
  CBOLH-68 K192Q primer
agcaaggactcctgccagggggacagtggaggc

SEQ ID NO: 197 - DNA, 33 bp, Artificial Sequence; identical to SEQ ID NO: 155
  K60aL/D60 wild-type primer

SEQ ID NO: 198 - DNA, 33 bp, Artificial Sequence
  CBOLH-69 K60aL/D60K primer
gcggcccactgtttcaagctcatcaagaactgg

SEQ ID NO: 199 - DNA, 33 bp, Artificial Sequence
  CBOLH-70 K60aL/D60L primer
gcggcccactgtttcctcctcatcaagaactgg

SEQ ID NO: 200 - DNA, 33 bp, Artificial Sequence
  CBOLH-71 K60aL/D60F primer
gcggcccactgtttctttctcatcaagaactgg

SEQ ID NO: 201 - DNA, 33 bp, Artificial Sequence
  CBOLH-72 K60aL/D60M primer
gcggcccactgtttcatgctcatcaagaactgg

SEQ ID NO: 202 - DNA, 33 bp, Artificial Sequence
  CBOLH-73 K60aL/D60W primer
gcggcccactgtttctggctcatcaagaactgg

SEQ ID NO: 203 - DNA, 33 bp, Artificial Sequence
  CBOLH-74 D60F primer
gcggcccactgtttctttgagatcaagaactgg

SEQ ID NO: 204 - DNA, 33 bp, Artificial Sequence
  CBOLH-75 D60W primer
gcggcccactgtttctgggagatcaagaactgg

SEQ ID NO: 205 - DNA, 33 bp, Artificial Sequence
  CBOLH-76 D60V primer
gcggcccactgtttcgtcgagatcaagaactgg

SEQ ID NO: 206 - protein, 406 aa, Homo sapiens
  R290N
ANAFLEELRPGSLERECKEEQCSFEEAREIFKDAERTKLFWISYSDGDQCASSPCQNGGSCKDQLQSYICFCLPAFEGRNCETHKDDQLICVNENGGCEQYCSDHTGTKRSCRCHEGYSLLADGVSCTPTVEYPCGKIPILEKRNASKPQGRIVGGKVCPKGECPWQVLLLVNGAQLCGGTLINTIWVVSAAHCFDKIKNWRNLIAVLGEHDLSEHDGDEQSRRVAQVIIPSTYVPGTTNHDIALLRLHQPVVLTDHVVPLCLPERTFSERTLAFVRFSLVSGWGQLLDNGATALELMVLNVPRLMTQDCLQQSRKVGDSPNITEYMFCAGYSDGSKDSCKGDSGGPHATHYRGTWYLTGIVSWGQGCATVGHFGVYTRVSQYIEWLQKLMRSEPRPGVLLRAPFP

SEQ ID NO: 207 - protein, 406 aa, Homo sapiens
  R290Q
ANAFLEELRPGSLERECKEEQCSFEEAREIFKDAERTKLFWISYSDGDQCASSPCQNGGSCKDQLQSYICFCLPAFEGRNCETHKDDQLICVNENGGCEQYCSDHTGTKRSCRCHEGYSLLADGVSCTPTVEYPCGKIPILEKRNASKPQGRIVGGKVCPKGECPWQVLLLVNGAQLCGGTLINTIWVVSAAHCFDKIKNWRNLIAVLGEHDLSEHDGDEQSRRVAQVIIPSTYVPGTTNHDIALLRLHQPVVLTDHVVPLCLPERTFSERTLAFVRFSLVSGWGQLLDQGATALELMVLNVPRLMTQDCLQQSRKVGDSPNITEYMFCAGYSDGSKDSCKGDSGGPHATHYRGTWYLTGIVSWGQGCATVGHFGVYTRVSQYIEWLQKLMRSEPRPGVLLRAPFP

SEQ ID NO: 208 - protein, 406 aa, Homo sapiens
  R290K
ANAFLEELRPGSLERECKEEQCSFEEAREIFKDAERTKLFWISYSDGDQCASSPCQNGGSCKDQLQSYICFCLPAFEGRNCETHKDDQLICVNENGGCEQYCSDHTGTKRSCRCHEGYSLLADGVSCTPTVEYPCGKIPILEKRNASKPQGRIVGGKVCPKGECPWQVLLLVNGAQLCGGTLINTIWVVSAAHCFDKIKNWRNLIAVLGEHDLSEHDGDEQSRRVAQVIIPSTYVPGTTNHDIALLRLHQPVVLTDHVVPLCLPERTFSERTLAFVRFSLVSGWGQLLDKGATALELMVLNVPRLMTQDCLQQSRKVGDSPNITEYMFCAGYSDGSKDSCKGDSGGPHATHYRGTWYLTGIVSWGQGCATVGHFGVYTRVSQYIEWLQKLMRSEPRPGVLLRAPFP

SEQ ID NO: 209 - protein, 406 aa, Homo sapiens
  R290M
ANAFLEELRPGSLERECKEEQCSFEEAREIFKDAERTKLFWISYSDGDQCASSPCQNGGSCKDQLQSYICFCLPAFEGRNCETHKDDQLICVNENGGCEQYCSDHTGTKRSCRCHEGYSLLADGVSCTPTVEYPCGKIPILEKRNASKPQGRIVGGKVCPKGECPWQVLLLVNGAQLCGGTLINTIWVVSAAHCFDKIKNWRNLIAVLGEHDLSEHDGDEQSRRVAQVIIPSTYVPGTTNHDIALLRLHQPVVLTDHVVPLCLPERTFSERTLAFVRFSLVSGWGQLLDMGATALELMVLNVPRLMTQDCLQQSRKVGDSPNITEYMFCAGYSDGSKDSCKGDSGGPHATHYRGTWYLTGIVSWGQGCATVGHFGVYTRVSQYIEWLQKLMRSEPRPGVLLRAPFP

SEQ ID NO: 210 - protein, 406 aa, Homo sapiens
  R290V
ANAFLEELRPGSLERECKEEQCSFEEAREIFKDAERTKLFWISYSDGDQCASSPCQNGGSCKDQLQSYICFCLPAFEGRNCETHKDDQLICVNENGGCEQYCSDHTGTKRSCRCHEGYSLLADGVSCTPTVEYPCGKIPILEKRNASKPQGRIVGGKVCPKGECPWQVLLLVNGAQLCGGTLINTIWVVSAAHCFDKIKNWRNLIAVLGEHDLSEHDGDEQSRRVAQVIIPSTYVPGTTNHDIALLRLHQPVVLTDHVVPLCLPERTFSERTLAFVRFSLVSGWGQLLDVGATALELMVLNVPRLMTQDCLQQSRKVGDSPNITEYMFCAGYSDGSKDSCKGDSGGPHATHYRGTWYLTGIVSWGQGCATVGHFGVYTRVSQYIEWLQKLMRSEPRPGVLLRAPFP

SEQ ID NO: 211 - protein, 406 aa, Homo sapiens
  K341N
ANAFLEELRPGSLERECKEEQCSFEEAREIFKDAERTKLFWISYSDGDQCASSPCQNGGSCKDQLQSYICFCLPAFEGRNCETHKDDQLICVNENGGCEQYCSDHTGTKRSCRCHEGYSLLADGVSCTPTVEYPCGKIPILEKRNASKPQGRIVGGKVCPKGECPWQVLLLVNGAQLCGGTLINTIWVVSAAHCFDKIKNWRNLIAVLGEHDLSEHDGDEQSRRVAQVIIPSTYVPGTTNHDIALLRLHQPVVLTDHVVPLCLPERTFSERTLAFVRFSLVSGWGQLLDRGATALELMVLNVPRLMTQDCLQQSRKVGDSPNITEYMFCAGYSDGSKDSCNGDSGGPHATHYRGTWYLTGIVSWGQGCATVGHFGVYTRVSQYIEWLQKLMRSEPRPGVLLRAPFP

SEQ ID NO: 212 - protein, 406 aa, Homo sapiens
  K341M
ANAFLEELRPGSLERECKEEQCSFEEAREIFKDAERTKLFWISYSDGDQCASSPCQNGGSCKDQLQSYICFCLPAFEGRNCETHKDDQLICVNENGGCEQYCSDHTGTKRSCRCHEGYSLLADGVSCTPTVEYPCGKIPILEKRNASKPQGRIVGGKVCPKGECPWQVLLLVNGAQLCGGTLINTIWVVSAAHCFDKIKNWRNLIAVLGEHDLSEHDGDEQSRRVAQVIIPSTYVPGTTNHDIALLRLHQPVVLTDHVVPLCLPERTFSERTLAFVRFSLVSGWGQLLDRGATALELMVLNVPRLMTQDCLQQSRKVGDSPNITEYMFCAGYSDGSKDSCMGDSGGPHATHYRGTWYLTGIVSWGQGCATVGHFGVYTRVSQYIEWLQKLMRSEPRPGVLLRAPFP

SEQ ID NO: 213 - protein, 406 aa, Homo sapiens
  K341D
ANAFLEELRPGSLERECKEEQCSFEEAREIFKDAERTKLFWISYSDGDQCASSPCQNGGSCKDQLQSYICFCLPAFEGRNCETHKDDQLICVNENGGCEQYCSDHTGTKRSCRCHEGYSLLADGVSCTPTVEYPCGKIPILEKRNASKPQGRIVGGKVCPKGECPWQVLLLVNGAQLCGGTLINTIWVVSAAHCFDKIKNWRNLIAVLGEHDLSEHDGDEQSRRVAQVIIPSTYVPGTTNHDIALLRLHQPVVLTDHVVPLCLPERTFSERTLAFVRFSLVSGWGQLLDRGATALELMVLNVPRLMTQDCLQQSRKVGDSPNITEYMFCAGYSDGSKDSCDGDSGGPHATHYRGTWYLTGIVSWGQGCATVGHFGVYTRVSQYIEWLQKLMRSEPRPGVLLRAPFP

SEQ ID NO: 214 - protein, 407 aa, Homo sapiens
  G237T238insA
ANAFLEELRPGSLERECKEEQCSFEEAREIFKDAERTKLFWISYSDGDQCASSPCQNGGSCKDQLQSYICFCLPAFEGRNCETHKDDQLICVNENGGCEQYCSDHTGTKRSCRCHEGYSLLADGVSCTPTVEYPCGKIPILEKRNASKPQGRIVGGKVCPKGECPWQVLLLVNGAQLCGGTLINTIWVVSAAHCFDKIKNWRNLIAVLGEHDLSEHDGDEQSRRVAQVIIPSTYVPGATTNHDIALLRLHQPVVLTDHVVPLCLPERTFSERTLAFVRFSLVSGWGQLLDRGATALELMVLNVPRLMTQDCLQQSRKVGDSPNITEYMFCAGYSDGSKDSCKGDSGGPHATHYRGTWYLTGIVSWGQGCATVGHFGVYTRVSQYIEWLQKLMRSEPRPGVLLRAPFP

SEQ ID NO: 215 - protein, 407 aa, Homo sapiens
  G237T238insS
ANAFLEELRPGSLERECKEEQCSFEEAREIFKDAERTKLFWISYSDGDQCASSPCQNGGSCKDQLQSYICFCLPAFEGRNCETHKDDQLICVNENGGCEQYCSDHTGTKRSCRCHEGYSLLADGVSCTPTVEYPCGKIPILEKRNASKPQGRIVGGKVCPKGECPWQVLLLVNGAQLCGGTLINTIWVVSAAHCFDKIKNWRNLIAVLGEHDLSEHDGDEQSRRVAQVIIPSTYVPGSTTNHDIALLRLHQPVVLTDHVVPLCLPERTFSERTLAFVRFSLVSGWGQLLDRGATALELMVLNVPRLMTQDCLQQSRKVGDSPNITEYMFCAGYSDGSKDSCKGDSGGPHATHYRGTWYLTGIVSWGQGCATVGHFGVYTRVSQYIEWLQKLMRSEPRPGVLLRAPFP

SEQ ID NO: 216 - protein, 407 aa, Homo sapiens
  G237T238insV
ANAFLEELRPGSLERECKEEQCSFEEAREIFKDAERTKLFWISYSDGDQCASSPCQNGGSCKDQLQSYICFCLPAFEGRNCETHKDDQLICVNENGGCEQYCSDHTGTKRSCRCHEGYSLLADGVSCTPTVEYPCGKIPILEKRNASKPQGRIVGGKVCPKGECPWQVLLLVNGAQLCGGTLINTIWVVSAAHCFDKIKNWRNLIAVLGEHDLSEHDGDEQSRRVAQVIIPSTYVPGVTTNHDIALLRLHQPVVLTDHVVPLCLPERTFSERTLAFVRFSLVSGWGQLLDRGATALELMVLNVPRLMTQDCLQQSRKVGDSPNITEYMFCAGYSDGSKDSCKGDSGGPHATHYRGTWYLTGIVSWGQGCATVGHFGVYTRVSQYIEWLQKLMRSEPRPGVLLRAPFP

SEQ ID NO: 217 - protein, 408 aa, Homo sapiens
  G237T238insAS
ANAFLEELRPGSLERECKEEQCSFEEAREIFKDAERTKLFWISYSDGDQCASSPCQNGGSCKDQLQSYICFCLPAFEGRNCETHKDDQLICVNENGGCEQYCSDHTGTKRSCRCHEGYSLLADGVSCTPTVEYPCGKIPILEKRNASKPQGRIVGGKVCPKGECPWQVLLLVNGAQLCGGTLINTIWVVSAAHCFDKIKNWRNLIAVLGEHDLSEHDGDEQSRRVAQVIIPSTYVPGASTTNHDIALLRLHQPVVLTDHVVPLCLPERTFSERTLAFVRFSLVSGWGQLLDRGATALELMVLNVPRLMTQDCLQQSRKVGDSPNITEYMFCAGYSDGSKDSCKGDSGGPHATHYRGTWYLTGIVSWGQGCATVGHFGVYTRVSQYIEWLQKLMRSEPRPGVLLRAPFP

SEQ ID NO: 218 - protein, 408 aa, Homo sapiens
  G237T238insSA
ANAFLEELRPGSLERECKEEQCSFEEAREIFKDAERTKLFWISYSDGDQCASSPCQNGGSCKDQLQSYICFCLPAFEGRNCETHKDDQLICVNENGGCEQYCSDHTGTKRSCRCHEGYSLLADGVSCTPTVEYPCGKIPILEKRNASKPQGRIVGGKVCPKGECPWQVLLLVNGAQLCGGTLINTIWVVSAAHCFDKIKNWRNLIAVLGEHDLSEHDGDEQSRRVAQVIIPSTYVPGSATTNHDIALLRLHQPVVLTDHVVPLCLPERTFSERTLAFVRFSLVSGWGQLLDRGATALELMVLNVPRLMTQDCLQQSRKVGDSPNITEYMFCAGYSDGSKDSCKGDSGGPHATHYRGTWYLTGIVSWGQGCATVGHFGVYTRVSQYIEWLQKLMRSEPRPGVLLRAPFP

SEQ ID NO: 219 - protein, 407 aa, Homo sapiens
  D196K197insK
ANAFLEELRPGSLERECKEEQCSFEEAREIFKDAERTKLFWISYSDGDQCASSPCQNGGSCKDQLQSYICFCLPAFEGRNCETHKDDQLICVNENGGCEQYCSDHTGTKRSCRCHEGYSLLADGVSCTPTVEYPCGKIPILEKRNASKPQGRIVGGKVCPKGECPWQVLLLVNGAQLCGGTLINTIWVVSAAHCFDKKIKNWRNLIAVLGEHDLSEHDGDEQSRRVAQVIIPSTYVPGTTNHDIALLRLHQPVVLTDHVVPLCLPERTFSERTLAFVRFSLVSGWGQLLDRGATALELMVLNVPRLMTQDCLQQSRKVGDSPNITEYMFCAGYSDGSKDSCKGDSGGPHATHYRGTWYLTGIVSWGQGCATVGHFGVYTRVSQYIEWLQKLMRSEPRPGVLLRAPFP

SEQ ID NO: 220 - protein, 407 aa, Homo sapiens
  D196K197insR
ANAFLEELRPGSLERECKEEQCSFEEAREIFKDAERTKLFWISYSDGDQCASSPCQNGGSCKDQLQSYICFCLPAFEGRNCETHKDDQLICVNENGGCEQYCSDHTGTKRSCRCHEGYSLLADGVSCTPTVEYPCGKIPILEKRNASKPQGRIVGGKVCPKGECPWQVLLLVNGAQLCGGTLINTIWVVSAAHCFDRKIKNWRNLIAVLGEHDLSEHDGDEQSRRVAQVIIPSTYVPGTTNHDIALLRLHQPVVLTDHVVPLCLPERTFSERTLAFVRFSLVSGWGQLLDRGATALELMVLNVPRLMTQDCLQQSRKVGDSPNITEYMFCAGYSDGSKDSCKGDSGGPHATHYRGTWYLTGIVSWGQGCATVGHFGVYTRVSQYIEWLQKLMRSEPRPGVLLRAPFP

SEQ ID NO: 221 - protein, 407 aa, Homo sapiens
  D196K197insY
ANAFLEELRPGSLERECKEEQCSFEEAREIFKDAERTKLFWISYSDGDQCASSPCQNGGSCKDQLQSYICFCLPAFEGRNCETHKDDQLICVNENGGCEQYCSDHTGTKRSCRCHEGYSLLADGVSCTPTVEYPCGKIPILEKRNASKPQGRIVGGKVCPKGECPWQVLLLVNGAQLCGGTLINTIWVVSAAHCFDYKIKNWRNLIAVLGEHDLSEHDGDEQSRRVAQVIIPSTYVPGTTNHDIALLRLHQPVVLTDHVVPLCLPERTFSERTLAFVRFSLVSGWGQLLDRGATALELMVLNVPRLMTQDCLQQSRKVGDSPNITEYMFCAGYSDGSKDSCKGDSGGPHATHYRGTWYLTGIVSWGQGCATVGHFGVYTRVSQYIEWLQKLMRSEPRPGVLLRAPFP

SEQ ID NO: 222 - protein, 407 aa, Homo sapiens
  D196K197insW
ANAFLEELRPGSLERECKEEQCSFEEAREIFKDAERTKLFWISYSDGDQCASSPCQNGGSCKDQLQSYICFCLPAFEGRNCETHKDDQLICVNENGGCEQYCSDHTGTKRSCRCHEGYSLLADGVSCTPTVEYPCGKIPILEKRNASKPQGRIVGGKVCPKGECPWQVLLLVNGAQLCGGTLINTIWVVSAAHCFDWKIKNWRNLIAVLGEHDLSEHDGDEQSRRVAQVIIPSTYVPGTTNHDIALLRLHQPVVLTDHVVPLCLPERTFSERTLAFVRFSLVSGWGQLLDRGATALELMVLNVPRLMTQDCLQQSRKVGDSPNITEYMFCAGYSDGSKDSCKGDSGGPHATHYRGTWYLTGIVSWGQGCATVGHFGVYTRVSQYIEWLQKLMRSEPRPGVLLRAPFP

SEQ ID NO: 223 - protein, 407 aa, Homo sapiens
  D196K197insA
ANAFLEELRPGSLERECKEEQCSFEEAREIFKDAERTKLFWISYSDGDQCASSPCQNGGSCKDQLQSYICFCLPAFEGRNCETHKDDQLICVNENGGCEQYCSDHTGTKRSCRCHEGYSLLADGVSCTPTVEYPCGKIPILEKRNASKPQGRIVGGKVCPKGECPWQVLLLVNGAQLCGGTLINTIWVVSAAHCFDAKIKNWRNLIAVLGEHDLSEHDGDEQSRRVAQVIIPSTYVPGTTNHDIALLRLHQPVVLTDHVVPLCLPERTFSERTLAFVRFSLVSGWGQLLDRGATALELMVLNVPRLMTQDCLQQSRKVGDSPNITEYMFCAGYSDGSKDSCKGDSGGPHATHYRGTWYLTGIVSWGQGCATVGHFGVYTRVSQYIEWLQKLMRSEPRPGVLLRAPFP

SEQ ID NO: 224 - protein, 407 aa, Homo sapiens
  D196K197insM
ANAFLEELRPGSLERECKEEQCSFEEAREIFKDAERTKLFWISYSDGDQCASSPCQNGGSCKDQLQSYICFCLPAFEGRNCETHKDDQLICVNENGGCEQYCSDHTGTKRSCRCHEGYSLLADGVSCTPTVEYPCGKIPILEKRNASKPQGRIVGGKVCPKGECPWQVLLLVNGAQLCGGTLINTIWVVSAAHCFDMKIKNWRNLIAVLGEHDLSEHDGDEQSRRVAQVIIPSTYVPGTTNHDIALLRLHQPVVLTDHVVPLCLPERTFSERTLAFVRFSLVSGWGQLLDRGATALELMVLNVPRLMTQDCLQQSRKVGDSPNITEYMFCAGYSDGSKDSCKGDSGGPHATHYRGTWYLTGIVSWGQGCATVGHFGVYTRVSQYIEWLQKLMRSEPRPGVLLRAPFP

SEQ ID NO: 225 - protein, 407 aa, Homo sapiens
  K197I198insE
ANAFLEELRPGSLERECKEEQCSFEEAREIFKDAERTKLFWISYSDGDQCASSPCQNGGSCKDQLQSYICFCLPAFEGRNCETHKDDQLICVNENGGCEQYCSDHTGTKRSCRCHEGYSLLADGVSCTPTVEYPCGKIPILEKRNASKPQGRIVGGKVCPKGECPWQVLLLVNGAQLCGGTLINTIWVVSAAHCFDKEIKNWRNLIAVLGEHDLSEHDGDEQSRRVAQVIIPSTYVPGTTNHDIALLRLHQPVVLTDHVVPLCLPERTFSERTLAFVRFSLVSGWGQLLDRGATALELMVLNVPRLMTQDCLQQSRKVGDSPNITEYMFCAGYSDGSKDSCKGDSGGPHATHYRGTWYLTGIVSWGQGCATVGHFGVYTRVSQYIEWLQKLMRSEPRPGVLLRAPFP

SEQ ID NO: 226 - protein, 407 aa, Homo sapiens
  K197I198insY
ANAFLEELRPGSLERECKEEQCSFEEAREIFKDAERTKLFWISYSDGDQCASSPCQNGGSCKDQLQSYICFCLPAFEGRNCETHKDDQLICVNENGGCEQYCSDHTGTKRSCRCHEGYSLLADGVSCTPTVEYPCGKIPILEKRNASKPQGRIVGGKVCPKGECPWQVLLLVNGAQLCGGTLINTIWVVSAAHCFDKYIKNWRNLIAVLGEHDLSEHDGDEQSRRVAQVIIPSTYVPGTTNHDIALLRLHQPVVLTDHVVPLCLPERTFSERTLAFVRFSLVSGWGQLLDRGATALELMVLNVPRLMTQDCLQQSRKVGDSPNITEYMFCAGYSDGSKDSCKGDSGGPHATHYRGTWYLTGIVSWGQGCATVGHFGVYTRVSQYIEWLQKLMRSEPRPGVLLRAPFP

SEQ ID NO: 227 - protein, 407 aa, Homo sapiens
  K197I198insA
ANAFLEELRPGSLERECKEEQCSFEEAREIFKDAERTKLFWISYSDGDQCASSPCQNGGSCKDQLQSYICFCLPAFEGRNCETHKDDQLICVNENGGCEQYCSDHTGTKRSCRCHEGYSLLADGVSCTPTVEYPCGKIPILEKRNASKPQGRIVGGKVCPKGECPWQVLLLVNGAQLCGGTLINTIWVVSAAHCFDKAIKNWRNLIAVLGEHDLSEHDGDEQSRRVAQVIIPSTYVPGTTNHDIALLRLHQPVVLTDHVVPLCLPERTFSERTLAFVRFSLVSGWGQLLDRGATALELMVLNVPRLMTQDCLQQSRKVGDSPNITEYMFCAGYSDGSKDSCKGDSGGPHATHYRGTWYLTGIVSWGQGCATVGHFGVYTRVSQYIEWLQKLMRSEPRPGVLLRAPFP

SEQ ID NO: 228 - protein, 407 aa, Homo sapiens
  K197I198insS
ANAFLEELRPGSLERECKEEQCSFEEAREIFKDAERTKLFWISYSDGDQCASSPCQNGGSCKDQLQSYICFCLPAFEGRNCETHKDDQLICVNENGGCEQYCSDHTGTKRSCRCHEGYSLLADGVSCTPTVEYPCGKIPILEKRNASKPQGRIVGGKVCPKGECPWQVLLLVNGAQLCGGTLINTIWVVSAAHCFDKSIKNWRNLIAVLGEHDLSEHDGDEQSRRVAQVIIPSTYVPGTTNHDIALLRLHQPVVLTDHVVPLCLPERTFSERTLAFVRFSLVSGWGQLLDRGATALELMVLNVPRLMTQDCLQQSRKVGDSPNITEYMFCAGYSDGSKDSCKGDSGGPHATHYRGTWYLTGIVSWGQGCATVGHFGVYTRVSQYIEWLQKLMRSEPRPGVLLRAPFP

SEQ ID NO: 229 - protein, 406 aa, Homo sapiens
  K197E/K341Q
ANAFLEELRPGSLERECKEEQCSFEEAREIFKDAERTKLFWISYSDGDQCASSPCQNGGSCKDQLQSYICFCLPAFEGRNCETHKDDQLICVNENGGCEQYCSDHTGTKRSCRCHEGYSLLADGVSCTPTVEYPCGKIPILEKRNASKPQGRIVGGKVCPKGECPWQVLLLVNGAQLCGGTLINTIWVVSAAHCFDEIKNWRNLIAVLGEHDLSEHDGDEQSRRVAQVIIPSTYVPGTTNHDIALLRLHQPVVLTDHVVPLCLPERTFSERTLAFVRFSLVSGWGQLLDRGATALELMVLNVPRLMTQDCLQQSRKVGDSPNITEYMFCAGYSDGSKDSCQGDSGGPHATHYRGTWYLTGIVSWGQGCATVGHFGVYTRVSQYIEWLQKLMRSEPRPGVLLRAPFP

SEQ ID NO: 230 - protein, 406 aa, Homo sapiens
  K197L/K341Q
ANAFLEELRPGSLERECKEEQCSFEEAREIFKDAERTKLFWISYSDGDQCASSPCQNGGSCKDQLQSYICFCLPAFEGRNCETHKDDQLICVNENGGCEQYCSDHTGTKRSCRCHEGYSLLADGVSCTPTVEYPCGKIPILEKRNASKPQGRIVGGKVCPKGECPWQVLLLVNGAQLCGGTLINTIWVVSAAHCFDLIKNWRNLIAVLGEHDLSEHDGDEQSRRVAQVIIPSTYVPGTTNHDIALLRLHQPVVLTDHVVPLCLPERTFSERTLAFVRFSLVSGWGQLLDRGATALELMVLNVPRLMTQDCLQQSRKVGDSPNITEYMFCAGYSDGSKDSCQGDSGGPHATHYRGTWYLTGIVSWGQGCATVGHFGVYTRVSQYIEWLQKLMRSEPRPGVLLRAPFP

SEQ ID NO: 231 - protein, 406 aa, Homo sapiens
  G237V/K341Q
ANAFLEELRPGSLERECKEEQCSFEEAREIFKDAERTKLFWISYSDGDQCASSPCQNGGSCKDQLQSYICFCLPAFEGRNCETHKDDQLICVNENGGCEQYCSDHTGTKRSCRCHEGYSLLADGVSCTPTVEYPCGKIPILEKRNASKPQGRIVGGKVCPKGECPWQVLLLVNGAQLCGGTLINTIWVVSAAHCFDKIKNWRNLIAVLGEHDLSEHDGDEQSRRVAQVIIPSTYVPVTTNHDIALLRLHQPVVLTDHVVPLCLPERTFSERTLAFVRFSLVSGWGQLLDRGATALELMVLNVPRLMTQDCLQQSRKVGDSPNITEYMFCAGYSDGSKDSCQGDSGGPHATHYRGTWYLTGIVSWGQGCATVGHFGVYTRVSQYIEWLQKLMRSEPRPGVLLRAPFP

SEQ ID NO: 232 - protein, 406 aa, Homo sapiens
  K197E/K199E
ANAFLEELRPGSLERECKEEQCSFEEAREIFKDAERTKLFWISYSDGDQCASSPCQNGGSCKDQLQSYICFCLPAFEGRNCETHKDDQLICVNENGGCEQYCSDHTGTKRSCRCHEGYSLLADGVSCTPTVEYPCGKIPILEKRNASKPQGRIVGGKVCPKGECPWQVLLLVNGAQLCGGTLINTIWVVSAAHCFDEIENWRNLIAVLGEHDLSEHDGDEQSRRVAQVIIPSTYVPGTTNHDIALLRLHQPVVLTDHVVPLCLPERTFSERTLAFVRFSLVSGWGQLLDRGATALELMVLNVPRLMTQDCLQQSRKVGDSPNITEYMFCAGYSDGSKDSCKGDSGGPHATHYRGTWYLTGIVSWGQGCATVGHFGVYTRVSQYIEWLQKLMRSEPRPGVLLRAPFP

SEQ ID NO: 233 - protein, 406 aa, Homo sapiens
  K197E/G237V
ANAFLEELRPGSLERECKEEQCSFEEAREIFKDAERTKLFWISYSDGDQCASSPCQNGGSCKDQLQSYICFCLPAFEGRNCETHKDDQLICVNENGGCEQYCSDHTGTKRSCRCHEGYSLLADGVSCTPTVEYPCGKIPILEKRNASKPQGRIVGGKVCPKGECPWQVLLLVNGAQLCGGTLINTIWVVSAAHCFDEIKNWRNLIAVLGEHDLSEHDGDEQSRRVAQVIIPSTYVPVTTNHDIALLRLHQPVVLTDHVVPLCLPERTFSERTLAFVRFSLVSGWGQLLDRGATALELMVLNVPRLMTQDCLQQSRKVGDSPNITEYMFCAGYSDGSKDSCKGDSGGPHATHYRGTWYLTGIVSWGQGCATVGHFGVYTRVSQYIEWLQKLMRSEPRPGVLLRAPFP

SEQ ID NO: 234 - protein, 406 aa, Homo sapiens
  K199E/K341Q
ANAFLEELRPGSLERECKEEQCSFEEAREIFKDAERTKLFWISYSDGDQCASSPCQNGGSCKDQLQSYICFCLPAFEGRNCETHKDDQLICVNENGGCEQYCSDHTGTKRSCRCHEGYSLLADGVSCTPTVEYPCGKIPILEKRNASKPQGRIVGGKVCPKGECPWQVLLLVNGAQLCGGTLINTIWVVSAAHCFDKIENWRNLIAVLGEHDLSEHDGDEQSRRVAQVIIPSTYVPGTTNHDIALLRLHQPVVLTDHVVPLCLPERTFSERTLAFVRFSLVSGWGQLLDRGATALELMVLNVPRLMTQDCLQQSRKVGDSPNITEYMFCAGYSDGSKDSCQGDSGGPHATHYRGTWYLTGIVSWGQGCATVGHFGVYTRVSQYIEWLQKLMRSEPRPGVLLRAPFP

SEQ ID NO: 235 - protein, 406 aa, Homo sapiens
  K197E/G237V/K341Q
ANAFLEELRPGSLERECKEEQCSFEEAREIFKDAERTKLFWISYSDGDQCASSPCQNGGSCKDQLQSYICFCLPAFEGRNCETHKDDQLICVNENGGCEQYCSDHTGTKRSCRCHEGYSLLADGVSCTPTVEYPCGKIPILEKRNASKPQGRIVGGKVCPKGECPWQVLLLVNGAQLCGGTLINTIWVVSAAHCFDEIKNWRNLIAVLGEHDLSEHDGDEQSRRVAQVIIPSTYVPVTTNHDIALLRLHQPVVLTDHVVPLCLPERTFSERTLAFVRFSLVSGWGQLLDRGATALELMVLNVPRLMTQDCLQQSRKVGDSPNITEYMFCAGYSDGSKDSCQGDSGGPHATHYRGTWYLTGIVSWGQGCATVGHFGVYTRVSQYIEWLQKLMRSEPRPGVLLRAPFP

SEQ ID NO: 236 - protein, 407 aa, Homo sapiens
  Gla swap FIX
YNSGKLEEFVQGNLERECMEEKCSFEEAREVFENTERTTEFWKQYSDGDQCASSPCQNGGSCKDQLQSYICFCLPAFEGRNCETHKDDQLICVNENGGCEQYCSDHTGTKRSCRCHEGYSLLADGVSCTPTVEYPCGKIPILEKRNASKPQGRIVGGKVCPKGECPWQVLLLVNGAQLCGGTLINTIWVVSAAHCFDKIKNWRNLIAVLGEHDLSEHDGDEQSRRVAQVIIPSTYVPGTTNHDIALLRLHQPVVLTDHVVPLCLPERTFSERTLAFVRFSLVSGWGQLLDRGATALELMVLNVPRLMTQDCLQQSRKVGDSPNITEYMFCAGYSDGSKDSCKGDSGGPHATHYRGTWYLTGIVSWGQGCATVGHFGVYTRVSQYIEWLQKLMRSEPRPGVLLRAPFP

SEQ ID NO: 237 - protein, 406 aa, Homo sapiens
  Gla swap FX
ANSFLEEMKKGHLERECMEETCSYEEAREVFEDSDKTNEFWNKYSDGDQCASSPCQNGGSCKDQLQSYICFCLPAFEGRNCETHKDDQLICVNENGGCEQYCSDHTGTKRSCRCHEGYSLLADGVSCTPTVEYPCGKIPILEKRNASKPQGRIVGGKVCPKGECPWQVLLLVNGAQLCGGTLINTIWVVSAAHCFDKIKNWRNLIAVLGEHDLSEHDGDEQSRRVAQVIIPSTYVPGTTNHDIALLRLHQPVVLTDHVVPLCLPERTFSERTLAFVRFSLVSGWGQLLDRGATALELMVLNVPRLMTQDCLQQSRKVGDSPNITEYMFCAGYSDGSKDSCKGDSGGPHATHYRGTWYLTGIVSWGQGCATVGHFGVYTRVSQYIEWLQKLMRSEPRPGVLLRAPFP

SEQ ID NO: 238 - protein, 406 aa, Homo sapiens
  Gla Swap Prot C
ANSFLEELRHSSLERECIEEICDFEEAKEIFQNVDDTLAFWSKHSDGDQCASSPCQNGGSCKDQLQSYICFCLPAFEGRNCETHKDDQLICVNENGGCEQYCSDHTGTKRSCRCHEGYSLLADGVSCTPTVEYPCGKIPILEKRNASKPQGRIVGGKVCPKGECPWQVLLLVNGAQLCGGTLINTIWVVSAAHCFDKIKNWRNLIAVLGEHDLSEHDGDEQSRRVAQVIIPSTYVPGTTNHDIALLRLHQPVVLTDHVVPLCLPERTFSERTLAFVRFSLVSGWGQLLDRGATALELMVLNVPRLMTQDCLQQSRKVGDSPNITEYMFCAGYSDGSKDSCKGDSGGPHATHYRGTWYLTGIVSWGQGCATVGHFGVYTRVSQYIEWLQKLMRSEPRPGVLLRAPFP

SEQ ID NO: 239 - protein, 406 aa, Homo sapiens
  Gla Swap Prot S
ANSLLEETKQGNLERECIEELCNKEEAREVFENDPETDYFYPKYSDGDQCASSPCQNGGSCKDQLQSYICFCLPAFEGRNCETHKDDQLICVNENGGCEQYCSDHTGTKRSCRCHEGYSLLADGVSCTPTVEYPCGKIPILEKRNASKPQGRIVGGKVCPKGECPWQVLLLVNGAQLCGGTLINTIWVVSAAHCFDKIKNWRNLIAVLGEHDLSEHDGDEQSRRVAQVIIPSTYVPGTTNHDIALLRLHQPVVLTDHVVPLCLPERTFSERTLAFVRFSLVSGWGQLLDRGATALELMVLNVPRLMTQDCLQQSRKVGDSPNITEYMFCAGYSDGSKDSCKGDSGGPHATHYRGTWYLTGIVSWGQGCATVGHFGVYTRVSQYIEWLQKLMRSEPRPGVLLRAPFP

SEQ ID NO: 240 - protein, 406 aa, Homo sapiens
  Gla swap Thrombin
ANTFLEEVRKGNLERECVEETCSYEEAFEALESSTATDVFWAKYSDGDQCASSPCQNGGSCKDQLQSYICFCLPAFEGRNCETHKDDQLICVNENGGCEQYCSDHTGTKRSCRCHEGYSLLADGVSCTPTVEYPCGKIPILEKRNASKPQGRIVGGKVCPKGECPWQVLLLVNGAQLCGGTLINTIWVVSAAHCFDKIKNWRNLIAVLGEHDLSEHDGDEQSRRVAQVIIPSTYVPGTTNHDIALLRLHQPVVLTDHVVPLCLPERTFSERTLAFVRFSLVSGWGQLLDRGATALELMVLNVPRLMTQDCLQQSRKVGDSPNITEYMFCAGYSDGSKDSCKGDSGGPHATHYRGTWYLTGIVSWGQGCATVGHFGVYTRVSQYIEWLQKLMRSEPRPGVLLRAPFP

SEQ ID NO: 241 - protein, 406 aa, Homo sapiens
  V158D/G237V/E296V/M298Q
ANAFLEELRPGSLERECKEEQCSFEEAREIFKDAERTKLFWISYSDGDQCASSPCQNGGSCKDQLQSYICFCLPAFEGRNCETHKDDQLICVNENGGCEQYCSDHTGTKRSCRCHEGYSLLADGVSCTPTVEYPCGKIPILEKRNASKPQGRIVGGKDCPKGECPWQVLLLVNGAQLCGGTLINTIWVVSAAHCFDKIKNWRNLIAVLGEHDLSEHDGDEQSRRVAQVIIPSTYVPVTTNHDIALLRLHQPVVLTDHVVPLCLPERTFSERTLAFVRFSLVSGWGQLLDRGATALVLQVLNVPRLMTQDCLQQSRKVGDSPNITEYMFCAGYSDGSKDSCKGDSGGPHATHYRGTWYLTGIVSWGQGCATVGHFGVYTRVSQYIEWLQKLMRSEPRPGVLLRAPFP

SEQ ID NO: 242 - protein, 406 aa, Homo sapiens
  K197E/G237V/M298Q
ANAFLEELRPGSLERECKEEQCSFEEAREIFKDAERTKLFWISYSDGDQCASSPCQNGGSCKDQLQSYICFCLPAFEGRNCETHKDDQLICVNENGGCEQYCSDHTGTKRSCRCHEGYSLLADGVSCTPTVEYPCGKIPILEKRNASKPQGRIVGGKVCPKGECPWQVLLLVNGAQLCGGTLINTIWVVSAAHCFDEIKNWRNLIAVLGEHDLSEHDGDEQSRRVAQVIIPSTYVPVTTNHDIALLRLHQPVVLTDHVVPLCLPERTFSERTLAFVRFSLVSGWGQLLDRGATALELQVLNVPRLMTQDCLQQSRKVGDSPNITEYMFCAGYSDGSKDSCKGDSGGPHATHYRGTWYLTGIVSWGQGCATVGHFGVYTRVSQYIEWLQKLMRSEPRPGVLLRAPFP

SEQ ID NO: 243 - protein, 406 aa, Homo sapiens
  K197E/G237V/M298Q/K341Q
ANAFLEELRPGSLERECKEEQCSFEEAREIFKDAERTKLFWISYSDGDQCASSPCQNGGSCKDQLQSYICFCLPAFEGRNCETHKDDQLICVNENGGCEQYCSDHTGTKRSCRCHEGYSLLADGVSCTPTVEYPCGKIPILEKRNASKPQGRIVGGKVCPKGECPWQVLLLVNGAQLCGGTLINTIWVVSAAHCFDEIKNWRNLIAVLGEHDLSEHDGDEQSRRVAQVIIPSTYVPVTTNHDIALLRLHQPVVLTDHVVPLCLPERTFSERTLAFVRFSLVSGWGQLLDRGATALELQVLNVPRLMTQDCLQQSRKVGDSPNITEYMFCAGYSDGSKDSCQGDSGGPHATHYRGTWYLTGIVSWGQGCATVGHFGVYTRVSQYIEWLQKLMRSEPRPGVLLRAPFP

SEQ ID NO: 244 - protein, 406 aa, Homo sapiens
  K197E/K199E/G237V/M298Q/K341Q
ANAFLEELRPGSLERECKEEQCSFEEAREIFKDAERTKLFWISYSDGDQCASSPCQNGGSCKDQLQSYICFCLPAFEGRNCETHKDDQLICVNENGGCEQYCSDHTGTKRSCRCHEGYSLLADGVSCTPTVEYPCGKIPILEKRNASKPQGRIVGGKVCPKGECPWQVLLLVNGAQLCGGTLINTIWVVSAAHCFDEIENWRNLIAVLGEHDLSEHDGDEQSRRVAQVIIPSTYVPVTTNHDIALLRLHQPVVLTDHVVPLCLPERTFSERTLAFVRFSLVSGWGQLLDRGATALELQVLNVPRLMTQDCLQQSRKVGDSPNITEYMFCAGYSDGSKDSCQGDSGGPHATHYRGTWYLTGIVSWGQGCATVGHFGVYTRVSQYIEWLQKLMRSEPRPGVLLRAPFP

SEQ ID NO: 245 - protein, 406 aa, Homo sapiens
  G237V/M298Q
ANAFLEELRPGSLERECKEEQCSFEEAREIFKDAERTKLFWISYSDGDQCASSPCQNGGSCKDQLQSYICFCLPAFEGRNCETHKDDQLICVNENGGCEQYCSDHTGTKRSCRCHEGYSLLADGVSCTPTVEYPCGKIPILEKRNASKPQGRIVGGKVCPKGECPWQVLLLVNGAQLCGGTLINTIWVVSAAHCFDKIKNWRNLIAVLGEHDLSEHDGDEQSRRVAQVIIPSTYVPVTTNHDIALLRLHQPVVLTDHVVPLCLPERTFSERTLAFVRFSLVSGWGQLLDRGATALELQVLNVPRLMTQDCLQQSRKVGDSPNITEYMFCAGYSDGSKDSCKGDSGGPHATHYRGTWYLTGIVSWGQGCATVGHFGVYTRVSQYIEWLQKLMRSEPRPGVLLRAPFP

SEQ ID NO: 246 - protein, 406 aa, Homo sapiens
  G237V/M298Q/K341Q
ANAFLEELRPGSLERECKEEQCSFEEAREIFKDAERTKLFWISYSDGDQCASSPCQNGGSCKDQLQSYICFCLPAFEGRNCETHKDDQLICVNENGGCEQYCSDHTGTKRSCRCHEGYSLLADGVSCTPTVEYPCGKIPILEKRNASKPQGRIVGGKVCPKGECPWQVLLLVNGAQLCGGTLINTIWVVSAAHCFDKIKNWRNLIAVLGEHDLSEHDGDEQSRRVAQVIIPSTYVPVTTNHDIALLRLHQPVVLTDHVVPLCLPERTFSERTLAFVRFSLVSGWGQLLDRGATALELQVLNVPRLMTQDCLQQSRKVGDSPNITEYMFCAGYSDGSKDSCQGDSGGPHATHYRGTWYLTGIVSWGQGCATVGHFGVYTRVSQYIEWLQKLMRSEPRPGVLLRAPFP

SEQ ID NO: 247 - protein, 407 aa, Homo sapiens
  M298Q/Gla Swap FIX
YNSGKLEEFVQGNLERECMEEKCSFEEAREVFENTERTTEFWKQYSDGDQCASSPCQNGGSCKDQLQSYICFCLPAFEGRNCETHKDDQLICVNENGGCEQYCSDHTGTKRSCRCHEGYSLLADGVSCTPTVEYPCGKIPILEKRNASKPQGRIVGGKVCPKGECPWQVLLLVNGAQLCGGTLINTIWVVSAAHCFDKIKNWRNLIAVLGEHDLSEHDGDEQSRRVAQVIIPSTYVPGTTNHDIALLRLHQPVVLTDHVVPLCLPERTFSERTLAFVRFSLVSGWGQLLDRGATALELQVLNVPRLMTQDCLQQSRKVGDSPNITEYMFCAGYSDGSKDSCKGDSGGPHATHYRGTWYLTGIVSWGQGCATVGHFGVYTRVSQYIEWLQKLMRSEPRPGVLLRAPFP

SEQ ID NO: 248 - protein, 406 aa, Homo sapiens
  K197E/M298Q
ANAFLEELRPGSLERECKEEQCSFEEAREIFKDAERTKLFWISYSDGDQCASSPCQNGGSCKDQLQSYICFCLPAFEGRNCETHKDDQLICVNENGGCEQYCSDHTGTKRSCRCHEGYSLLADGVSCTPTVEYPCGKIPILEKRNASKPQGRIVGGKVCPKGECPWQVLLLVNGAQLCGGTLINTIWVVSAAHCFDEIKNWRNLIAVLGEHDLSEHDGDEQSRRVAQVIIPSTYVPGTTNHDIALLRLHQPVVLTDHVVPLCLPERTFSERTLAFVRFSLVSGWGQLLDRGATALELQVLNVPRLMTQDCLQQSRKVGDSPNITEYMFCAGYSDGSKDSCKGDSGGPHATHYRGTWYLTGIVSWGQGCATVGHFGVYTRVSQYIEWLQKLMRSEPRPGVLLRAPFP

SEQ ID NO: 249 - protein, 406 aa, Homo sapiens
  M298Q/K341D
ANAFLEELRPGSLERECKEEQCSFEEAREIFKDAERTKLFWISYSDGDQCASSPCQNGGSCKDQLQSYICFCLPAFEGRNCETHKDDQLICVNENGGCEQYCSDHTGTKRSCRCHEGYSLLADGVSCTPTVEYPCGKIPILEKRNASKPQGRIVGGKVCPKGECPWQVLLLVNGAQLCGGTLINTIWVVSAAHCFDKIKNWRNLIAVLGEHDLSEHDGDEQSRRVAQVIIPSTYVPGTTNHDIALLRLHQPVVLTDHVVPLCLPERTFSERTLAFVRFSLVSGWGQLLDRGATALELQVLNVPRLMTQDCLQQSRKVGDSPNITEYMFCAGYSDGSKDSCDGDSGGPHATHYRGTWYLTGIVSWGQGCATVGHFGVYTRVSQYIEWLQKLMRSEPRPGVLLRAPFP

SEQ ID NO: 250 - protein, 406 aa, Homo sapiens
  K197E/K199E/K341Q
ANAFLEELRPGSLERECKEEQCSFEEAREIFKDAERTKLFWISYSDGDQCASSPCQNGGSCKDQLQSYICFCLPAFEGRNCETHKDDQLICVNENGGCEQYCSDHTGTKRSCRCHEGYSLLADGVSCTPTVEYPCGKIPILEKRNASKPQGRIVGGKVCPKGECPWQVLLLVNGAQLCGGTLINTIWVVSAAHCFDEIENWRNLIAVLGEHDLSEHDGDEQSRRVAQVIIPSTYVPGTTNHDIALLRLHQPVVLTDHVVPLCLPERTFSERTLAFVRFSLVSGWGQLLDRGATALELMVLNVPRLMTQDCLQQSRKVGDSPNITEYMFCAGYSDGSKDSCQGDSGGPHATHYRGTWYLTGIVSWGQGCATVGHFGVYTRVSQYIEWLQKLMRSEPRPGVLLRAPFP

1. A modified factor VII (FVII) polypeptide, comprising a modification in a FVII polypeptide, allelic and species variant thereof or active fragments thereof; wherein
the modification is at a position corresponding to position D196, K197 or K199 in a FVII polypeptide having a sequence of amino acids set forth in SEQ ID NO:3 or in corresponding residues in a FVII polypeptide; and
the modification is replacement by a hydrophobic or acidic amino acid, wherein
the hydrophobic or acidic amino acid is selected from among Val (V), Leu (L), Ile (I), Phe (F), Trp (W), Met (M), Tyr (Y), Cys (C), Asp (D) and Glu (E).

2. The modified FVII polypeptide of claim 1, wherein the modification in a FVII polypeptide is selected from among D196F, D196W, D196L, D196I, K197E, K197D, K197L, K197M, K197I, K197V, K197F, K197W, K199D and K199E.

3. The modified FVII polypeptide of claim 2, wherein the modification in a FVII polypeptide is D196Y or K197Y.

4. The modified FVII polypeptide of claim 1, further comprising a further modification at another position in the FVII polypeptide.

5. The modified FVII polypeptide of claim 4, wherein the further modification is an amino acid replacement, insertion or deletion.

6. The modified FVII polypeptide of claim 4, wherein the further modification is an amino acid replacement or insertion at a position corresponding to a position selected from among D196, K197, K199, G237, T239, R290 and K341, wherein the first modification and second modification are at different amino acids.

7. The modified FVII polypeptide of claim 4, wherein the further amino acid modification is selected from among D 196K, D196R, D196A, D196Y, D196F, D196W, D196L, D196I, K197Y, K197A, K197E, K197D, K197L, K197M, K197I, K197V, K197F, K197W, K199A, K199D, K199E, G237W, G237T, G237I, G237V, T239A, R290A, R290E, R290D, R290N, R290Q, R290K, K341E, K341R, K341N, K341M, K341D and K341Q

8. The modified FVII polypeptide of claim 5, wherein the further modification is an amino acid insertion selected from among G237T238insA, G237T238insS, G237T238insV, G237T238insAS, G237T238insSA, D196K197insK, D196K197insR, D196K197insY, D196K197insW, D196K197insA, D196K197insM, K1971198insE, K1971198insY, K1971198insA and K1971198insS.

9. The modified FVII polypeptide claim 4, comprising modifications selected from among D196R/K197E/K199E, D196K/K197E/K199E, D196R/K197E/K199E/R290E, D196R/K197M/K199E, D196R/K197M/K199E/R290E, D196K/K197L, D196F/K197L, D196L/K197L, D196M/K197L, D196W/K197L, D196F/K197E, D196W/K197E, K196V/K197E, K197E/K341Q, K197L/K341Q, K197E/G237V/K341Q, K197E/K199E, K197E/G237V, K199E/K341Q and K197E/K199E/K341Q.

10. A pharmaceutical composition, comprising a therapeutically effective concentration or amount of a modified FVII polypeptide of claim 1 in a pharmaceutically acceptable vehicle.

11. A method, comprising treating a subject by administering the pharmaceutical composition of claim 10 to the subject, wherein the subject has a disease or condition that is treated by administration of FVII or a pro-coagulant.

12. The method of claim 11, wherein the disease or condition is treated by administration of a zymogen or active form of FVII.

13. The method of any of claims 12, wherein the disease or condition to be treated is selected from among blood coagulation disorders, hematologic disorders, hemorrhagic disorders, hemophilias, factor VII deficiency, bleeding disorders, surgical bleeding, or bleeding resulting from trauma.

14. A nucleic acid molecule, comprising a sequence of nucleotides encoding a modified FVII polypeptide of claim 1.

15. A vector, comprising the nucleic acid molecule of claim 14.

16. The vector of claim 15, wherein the vector is a prokaryotic vector, viral vector or a eukaryotic vector.

17. The vector of claim 15, wherein the vector is a mammalian vector or a yeast vector.

18. The vector of claim 16, wherein the vector is selected from among an adenovirus, an adeno-associated-virus, a retrovirus, a herpes virus, a lentivirus, a poxvirus, a cytomegalovirus and Pichia.

19. A cell, comprising the vector of claim 15.

20. The cell of claim 19 that is a mammalian or yeast cell.

21. The cell of claim 20, wherein the cell is selected from among a baby hamster kidney cell (BHK-21), a 293 cell, a CHO cell or a Pichia cell.

22. The cell of claim 19, wherein the cell expresses the modified FVII polypeptide.

23. A modified factor VII (FVII) polypeptide, comprising a modification in a FVII polypeptide, allelic or species variant thereof or active fragments thereof, selected from among amino acid modifications corresponding to D 196R, D 196Y, D196F, D196W, D196L, D196I, K197Y, K197E, K197D, K197L, K197M, K197M, K197I, K197V, K197F, K197W, K199D, K199E, G237W, G237I, G237V, R290M, R290V, K341M, K341D, G237T238insA, G237T238insS, G237T238insV, G237T238insAS, G237T238insSA, D196K197insK, D196K197insR, D196K197insY, D196K197insW, D196K197insA, D196K197insM, K1971198insE, K1971198insY, K1971198insA or K1971198insS in a FVII polypeptide having a sequence of amino acids set forth in SEQ ID NO:3 or in corresponding residues in a FVII polypeptide.

24. The modified FVII polypeptide of claim 23, comprising a further modification at another position in the FVII polypeptide.

25. The modified FVII polypeptide of claim 24, wherein the further modification is an amino acid replacement, insertion or deletion.

26. The modified FVII polypeptide of claim 23, wherein the further modification is one or more of an amino acid replacement at a position corresponding to a position selected from among D196, K197, K199, G237, T239, R290 and K341, wherein the further modification is in a different position from the first modification.

27. The modified FVII polypeptide of claim 25, wherein the further amino acid modification is selected from among D196K, D196R, D196A, D196Y, D196F, D196M, D196W, D196L, D196I, K197Y, K197A, K197E, K197D, K197L, K197M, K197I, K197V, K197F, K197W, K199A, K199D, K199E, G237W, G237T, G237I, G237V, T239A, R290A, R290E, R290D, R290N, R290Q, R290K, K341E, K341R, K341N, K341M, K341D, and K341Q.

28. The modified FVII polypeptide of claim 26, comprising modifications selected from among D196R/R290E, D196R/R290D, D196R/K197E/K199E, D196K/K197E/K199E, D196R/K197E/K199E/R290E, D196R/K197M/K199E, D196R/K197M/K199E/R290E, D196K/K197L, D196F/K197L, D196L/K197L, D196M/K197L, D196W/K197L, D196F/K197E, D196W/K197E, K197L/K341Q, G237V/K341Q, K197E/G237V/K341Q, K197E/K199E, K197E/G237V, K199E/K341Q, K197E/K199E/K341Q and K196V/K197E.

29. A pharmaceutical composition, comprising a therapeutically effective concentration or amount of a modified FVII polypeptide of claim 23 in a pharmaceutically acceptable vehicle.

30. A method, comprising treating a subject by administering the pharmaceutical composition of claim 29 to the subject, wherein the subject has a disease or condition that is treated by administration of FVII or a pro-coagulant.

31. The method of claim 30, wherein the disease or condition is treated by administration of a zymogen or active form of FVII.

32. The method of any of claims 31, wherein the disease or condition to be treated is selected from among blood coagulation disorders, hematologic disorders, hemorrhagic disorders, hemophilias, factor VII deficiency, bleeding disorders, surgical bleeding, or bleeding resulting from trauma.

33. A nucleic acid molecule, comprising a sequence of nucleotides encoding a modified FVII polypeptide of claim 23.

34. A vector, comprising the nucleic acid molecule of claim 33.

35. The vector of claim 34, wherein the vector is a prokaryotic vector, viral vector or a eukaryotic vector.

36. The vector of claim 34, wherein the vector is a mammalian vector or a yeast vector.

37. The vector of claim 35, wherein the vector is selected from among an adenovirus, an adeno-associated-virus, a retrovirus, a herpes virus, a lentivirus, a poxvirus, a cytomegalovirus and Pichia.

38. A cell, comprising the vector of claim 34.

39. The cell of claim 38 that is a mammalian or yeast cell.

40. The cell of claim 39, wherein the cell is selected from among a baby hamster kidney cell (BHK-21), a 293 cell, a CHO cell or a Pichia cell.

41. The cell of claim 38, wherein the cell expresses the modified FVII polypeptide.

42. A modified factor VII (FVII) polypeptide, comprising two or more modifications in a FVII polypeptide, allelic and species variant thereof or active fragments thereof, wherein:
the two or more amino acid modifications are selected from among amino acid modifications corresponding to D196K, D196R, D196A, D196Y, D196F, D196M, D196W, D196L, D196I, K197Y, K197A, K197E, K197D, K197L, K197M, K197I, K197V, K197F, K197W, K199A, K199D, K199E, G237W, G237T, G237I, G237V, T239A, R290A, R290E, R290D, R290N, R290Q, R290K, K341E, K341R, K341N, K341M, K341D, K341Q, G237T238insA, G237T238insS, G237T238insV, G237T238insAS, G237T238insSA, D196K197insK, D196K197insR, D196K197insY, D196K197insW, D196K197insA, D196K197insM, K1971198insE, K1971198insY, K1971198insA or K1971198insS in a FVII polypeptide having a sequence of amino acids set forth in SEQ ID NO:3 or in corresponding residues in a FVII polypeptide.

43. The modified FVII polypeptide of claim 15, wherein the FVII polypeptide contains 2, 3, 4, 5, 6 or 7 modifications.

44. The modified FVII polypeptide of claim 15, comprising modifications selected from among D196R/R290E, D196K/R290E, D196R/R290D, D196R/K197E/K199E, D196K/K197E/K199E, D196R/K197E/K199E/R290E, D196R/K197M/K199E, D196R/K197M/K199E/R290E, D196K/K197L, D196F/K197L, D196L/K197L, D196M/K197L, D196W/K197L, D196F/K197E, D196W/K197E, D196V/K197E, K197E/K341Q, K197L/K341Q, G237V/K341Q, K197E/G237V/K341Q, K197E/K199E, K197E/G237V, K199E/K341Q, K197E/K199E/K341Q and K197E/G237V/M298Q.

45. The modified FVII polypeptide of claim 42 that exhibits increased resistance to tissue factor pathway inhibitor (TFPI) compared with the unmodified FVII polypeptide.

46. A pharmaceutical composition, comprising a therapeutically effective concentration or amount of a modified FVII polypeptide of claim 42 in a pharmaceutically acceptable vehicle.

47. A method, comprising treating a subject by administering the pharmaceutical composition of claim 46 to the subject, wherein the subject has a disease or condition that is treated by administration of FVII or a pro-coagulant.

48. The method of claim 47, wherein the disease or condition is treated by administration of a zymogen or active form of FVII.

49. The method of any of claims 48, wherein the disease or condition to be treated is selected from among blood coagulation disorders, hematologic disorders, hemorrhagic disorders, hemophilias, factor VII deficiency, bleeding disorders, surgical bleeding, or bleeding resulting from trauma.

50. A nucleic acid molecule, comprising a sequence of nucleotides encoding a modified FVII polypeptide of claim 42.

51. A vector, comprising the nucleic acid molecule of claim 50.

52. The vector of claim 51, wherein the vector is a prokaryotic vector, viral vector or a eukaryotic vector.

53. The vector of claim 51, wherein the vector is a mammalian vector or a yeast vector.

54. The vector of claim 52, wherein the vector is selected from among an adenovirus, an adeno-associated-virus, a retrovirus, a herpes virus, a lentivirus, a poxvirus, a cytomegalovirus and Pichia.

55. A cell, comprising the vector of claim 51.

56. The cell of claim 55 that is a mammalian or yeast cell.

57. The cell of claim 56, wherein the cell is selected from among a baby hamster kidney cell (BHK-21), a 293 cell, a CHO cell or a Pichia cell.

58. The cell of claim 55, wherein the cell expresses the modified FVII polypeptide.

59. The modified FVII polypeptide of claim 1, further comprising a heterologous Gla domain, or a sufficient portion thereof to effect phospholipid binding by the heterologous Gla domain.

60. The modified FVII polypeptide of claim 23, further comprising a heterologous Gla domain, or a sufficient portion thereof to effect phospholipid binding by the heterologous Gla domain.

61. The modified FVII polypeptide of claim 42, further comprising a heterologous Gla domain, or a sufficient portion thereof to effect phospholipid binding by the heterologous Gla domain.

62. A modified factor VII (FVII) polypeptide, comprising a heterologous Gla domain, or a sufficient portion thereof to effect phospholipid binding.

63. The modified FVII polypeptide of claim 62, wherein the sufficient portion includes 30%, 40%, 50%, 60%, 70%, 80%, 90%, 91%, 92%, 93%, 94%, 95%, 96%, 97%, 98%, 99%, or more of the heterologous Gla domain.

64. The modified FVII polypeptide of claim 62, wherein the heterologous Gla domain is selected from among a Gla domain in Factor IX (FIX), Factor X (FX), prothrombin, protein C, protein S, osteocalcin, matrix Gla protein, Growth-arrest-specific protein 6 (Gas6) and protein Z.

65. The modified FVII polypeptide of claim 62, wherein the heterologous Gla domain has a sequence of amino acids set forth in any of SEQ ID NOS: 110-118, 120 and 121, or a sufficient portion thereof to effect phospholipid binding.

66. The modified FVII polypeptide of claim 62, wherein all or a contiguous portion of the native FVII Gla domain is removed and is replaced with the heterologous Gla domain, or a sufficient portion thereof to effect phospholipid binding.

67. The modified FVII polypeptide of claim 66, wherein the native FVII Gla domain includes amino acids 1-45 in a FVII polypeptide having a sequence of amino acids set forth in SEQ ID NO:3, or in corresponding residues in a FVII polypeptide.

68. The modified FVII polypeptide of claim 66, comprising a modification selected from among Gla Swap FIX, Gla Swap FX, Gla Swap Prot C, Gla Swap Prot S, Gla Swap Thrombin.

69. The modified FVII polypeptide of claim 62, wherein:
the modified FVII polypeptide contains further modifications to exhibit increased resistance to tissue factor pathway inhibitor (TFPI) compared to a unmodified FVII polypeptide that does not include the further modifications.

70. The modified FVII polypeptide of claim 69, wherein the further modifications are one or more amino acid modification(s) at positions selected from among D196, K197, K199, G237, T239, R290, and K341 in a FVII polypeptide having a sequence of amino acids set forth in SEQ ID NO:3 or in corresponding residues in a FVII polypeptide.

71. The modified FVII polypeptide of claim 70, wherein the one or more amino acid modification(s) are selected from among D196K, D196R, D196A, D196Y, D196F, D196M, D196W, D196L, D196I, K197Y, K197A, K197E, K197D, K197L, K197M, K197I, K197V, K197F, K197W, K199A, K199D, K199E, G237W, G237T, G237I, G237V, T239A, R290A, R290E, R290D, R290N, R290Q, R290K, K341E, K341R, K341N, K341M, K341D, K341Q, G237T238insA, G237T238insS, G237T238insV, G237T238insAS, G237T238insSA, D196K197insK, D196K197insR, D196K197insY, D196K197insW, D196K197insA, D196K197insM, K1971198insE, K1971198insY, K1971198insA and K1971198insS.

72. The modified FVII polypeptide of claim 71, wherein the one or more amino acid modification(s) are selected from among D196R/R290E, D196K/R290E, D196R/R290D, D196R/K197E/K199E, D196K/K197E/K199E, D196R/K197E/K199E/R290E, D196R/K197M/K199E, and D196R/K197M/K199E/R290E.

73. The modified FVII polypeptide claim 1, comprising one or more further amino acid modification(s) at position Q176, M298 or E296 in a FVII polypeptide having a sequence of amino acids set forth in SEQ ID NO:3 or in corresponding residues in a FVII polypeptide.

74. The modified FVII polypeptide of claim 73, wherein the amino acid modifications are selected from among Q176A, M298Q, E296V and E296A.

75. The modified FVII polypeptide of claim 74, comprising amino acid modifications selected from among V158D/G237V/E296V/M298Q, K197E/G237V/M298Q, K197E/G237V/M298Q/K341Q, K197E/K199E/G237V/M298Q/K341Q, G237V/M298Q, G237V/M298Q/K341Q, M298Q/Gla Swap FIX, K197E/M298Q and M298Q/K341D.

76. The modified FVII polypeptide claim 23, comprising one or more further amino acid modification(s) at position Q176, M298 or E296 in a FVII polypeptide having a sequence of amino acids set forth in SEQ ID NO:3 or in corresponding residues in a FVII polypeptide.

77. The modified FVII polypeptide of claim 76, wherein the amino acid modifications are selected from among Q176A, M298Q, E296V and E296A.

78. The modified FVII polypeptide of claim 77, comprising amino acid modifications selected from among V158D/G237V/E296V/M298Q, K197E/G237V/M298Q, K197E/G237V/M298Q/K341Q, K197E/K199E/G237V/M298Q/K341Q, G237V/M298Q, G237V/M298Q/K341Q, M298Q/Gla Swap FIX, K197E/M298Q and M298Q/K341D.

79. The modified FVII polypeptide claim 42, comprising one or more further amino acid modification(s) at position Q176, M298 or E296 in a FVII polypeptide having a sequence of amino acids set forth in SEQ ID NO:3 or in corresponding residues in a FVII polypeptide.

80. The modified FVII polypeptide of claim 79, wherein the amino acid modifications are selected from among Q176A, M298Q, E296V and E296A.

81. The modified FVII polypeptide of claim 80, comprising amino acid modifications selected from among V158D/G237V/E296V/M298Q, K197E/G237V/M298Q, K197E/G237V/M298Q/K341Q, K197E/K199E/G237V/M298Q/K341Q, G237V/M298Q, G237V/M298Q/K341Q, M298Q/Gla Swap FIX, K197E/M298Q and M298Q/K341D.

82. The modified FVII polypeptide of claim 1, comprising one or more further amino acid modification(s) selected from among S278C/V302C, L279C/N301C, V280C/V301C, S281C/V299C, insertion of a tyrosine at position 4, F4S, F4T, P10Q, P10E, P10D, P10N, Q21N, R28F, R28E, I30C, I30D, I30E, K32D, K32Q, K32E, K32G, K32H, K32T, K32C, K32A, K32S, D33C, D33F, D33E, D33K, A34C, A34E, A34D, A34I, A34L, A34M, A34V, A34F, A34W, A34Y, R36D, R36E, T37C, T37D, T37E, K38C, K38E, K38T, K38D, K38L, K38G, K38A, K38S, K38N, K38H, L39E, L39Q, L39H, W41N, W41C, W41E, W41D, I42R, I42N, I42S, I42A, I42Q, I42N, I42S, I42A, I42Q, I42K, S43Q, S43N, Y44K, Y44C, Y44D, Y44E, S45C, S45D, S45E, D46C, A51N, S53N, G58N, G59S, G59T, K62E, K62R, K62D, K62N, K62Q, K62T, L65Q, L65S, L65N, F71D, F71Y, F71E, F71Q, F71N, P74S, P74A, A75E, A75D, E77A, E82Q, E82N, E82S, E82T T83K, N95S, N95T, G97S, G97T, Y101N, D104N, T106N, K109N, E116D, G117N, G124N, S126N, T128N, L141C, L141D, L141E, E142D, E142C, K143C, K143D, K143E, R144E, R144C, R144D, N145Y, N145G, N145F, N145M, N145S, N145I, N145L, N145T, N145V, N145P, N145K, N145H, N145Q, N145E, N145R, N145W, N145D, N145C, K157V, K157L, K157I, K157M, K157F, K157W, K157P, K157G, K157S, K157T, K157C, K157Y, K157N, K157E, K157R, K157H, K157D, K157Q, V158L, V158I, V158M, V158F, V158W, V158P, V158G, V158S, V158T, V158C, V158Y, V158N, V158E, V158R, V158K, V158H, V158D, V158Q, A175S, A175T, G179N, I186S, I186T, V188N, R202S, R202T, I205S, I205T, D212N, E220N, I230N, P231N, P236N, G237N, Q250C, V253N, E265N, T267N, E270N, A274M, A274L, A274K, A274R, A274D, A274V, A274I, A274F, A274W, A274P, A274G, A274T, A274C, A274Y, A274N, A274E, A274H, A274S, A274Q, F275H, R277N, F278S, F278A, F278N, F278Q, F278G, L280N, L288K, L288C, L288D, D289C, D289K, L288E, R290C, R290G, R290A, R290S, R290T, R290K, R290D, R290E, G291E, G291D, G291C, G291N, G291K, A292C, A292K, A292D, A292E, T293K, E296V, E296L, E296I, E296M, E296F, E296W, E296P, E296G, E296S, E296T, E296C, E296Y, E296N, E296K, E296R, E296H, E296D, E296Q, M298Q, M298V, M298L, M298I, M298F, M298W, M298P, M298G, M298S, M298T, M298C, M298Y, M298N, M298K, M298R, M298H, M298E, M298D, P303S, P303ST, R304Y, R304F, R304L, R304M, R304G, R304T, R304A, R304S, R304N, L305V, L305Y, L305I, L305F, L305A, L305M, L305W, L305P, L305G, L305S, L305T, L305C, L305N, L305E, L305K, L305R, L305H, L305D, L305Q, M306D, M306N, D309S, D309T, Q312N, Q313K, Q313D, Q313E, S314A, S314V, S314I, S314M, S314F, S314W, S314P, S314G, S314L, S314T, S314C, S314Y, S314N, S314E, S314K, S314R, S314H, S314D, S314Q, R315K, R315G, R315A, R315S, R315T, R315Q, R315C, R315D, R315E, K316D, K316C, K316E, V317C, V317K, V317D, V317E, G318N, N322Y, N322G, N322F, N322M, N322S, N322I, N322L, N322T, N322V, N322P, N322K, N322H, N322Q, N322E, N322R, N322W, N322C, G331N, Y332S, Y332A, Y332N, Y332Q, Y332G, D334G, D334E, D334A, D334V, D334I, D334M, D334F, D334W, D334P, D334L, D334T, D334C, D334Y, D334N, D334K, D334R, D334H, D334S, D334Q, S336G, S336E, S336A, S336V, S336I, S336M, S336F, S336W, S336P, S336L, S336T, S336C, S336Y, S336N, S336K, S336R, S336H, S336D, S336Q, K337L, K337V, K337I, K337M, K337F, K337W, K337P, K337G, K337S, K337T, K337C, K337Y, K337N, K337E, K337R, K337H, K337D, K337Q, K341E, K341Q, K341G, K341T, K341A, K341S, G342N, H348N, R353N, Y357N, I361N, F374P, F374A, F374V, F374I, F374L, F374M, F374W, F374G, F374S, F374T, F374C, F374Y, F374N, F374E, F374K, F374R, F374H, F374D, F374Q, V376N, R379N, L390C, L390K, L390D, L390E, M391D, M391C, M391K, M391N, M391E, R392C, R392D, R392E, S393D, S393C, S393K, S393E, E394K, P395K, E394C, P395D, P395C, P395E, R396K, R396C, R396D, R396E, P397D, P397K, P397C, P397E, G398K, G398C, G398D, G398E, V399C, V399D, V399K, V399E, L400K, L401K, L401C, L401D, L401E, R402D, R402C, R402K, R402E, A403K, A403C, A403D, A403E, P404E, P404D, P404C, P404K, F405K, P406C, K32N/A34S, K32N/A34T, F31N/D33S, F31N/D33T, 130N/K32S, 130N/K32T, A34N/R36S, A34N/R36T, K38N/F40S, K38N/F40T, T37N/L39S, T37N/L39T, R36N/K38S, R36N/K38T, L39N/W41S, L39N/W41T, F40N/142S, F40N/142T, I42N/Y44S, I42N/Y44T, Y44N/D46S, Y44N/D46T, D46N/D48S, D46N/D48T, G47N/Q49S, G47N/Q49T, K143N/N145S, K143N/N145T, E142N/R144S, E142N/R144T, L141N/K143S, L141N/K143T, I140N/E142S/, I140N/E142T, R144N/A146S, R144N/A146T, A146N/K148S, A146N/K148T, S147N/P149S/, S147N/P149T, R290N/A292S, R290N/A292T, D289N/G291S, D289N/G291T, L288N/R290S, L288N/R290T, L287N/D289S, L287N/D289, A292N/A294S, A292N/A294T, T293N/L295S, T293N/L295T, R315N/V317S, R315N/V317T, S314N/K316S, S314N/K316T, Q313N/R315S, Q313N/R315T, K316N/G318S, K316N/G318T, V317N/D319S, V317N/D319T, K341N/D343S, K341N/D343T, S339N/K341S, S339N/K341T, D343N/G345S, D343N/G345T, R392N/E394S, R392N/E394T, L390N/R392S, L390N/R392T, K389N/M391S, K389N/M391T, S393N/P395S, S393N/P395T, E394N/R396S, E394N/R396T, P395N/P397S, P395N/P397T, R396N/G398S, R396N/G398T, P397N/V399S, P397N/V399T, G398N/L400S, G398N/L400T, V399N/L401S, V399N/L401T, L400N/R402S, L400N/R402T, L401N/A403S, L401N/A403T, R402N/P404S, R402N/P404T, A403N/F405S, A403N/F405T, P404N/P406S and P404N/P406T.

83. The modified FVII polypeptide of claim 23, comprising one or more further amino acid modification(s) selected from among S278C/V302C, L279C/N301C, V280C/V301C, S281C/V299C, insertion of a tyrosine at position 4, F4S, F4T, P10Q, P10E, P10D, P10N, Q21N, R28F, R28E, I30C, I30D, I30E, K32D, K32Q, K32E, K32G, K32H, K32T, K32C, K32A, K32S, D33C, D33F, D33E, D33K, A34C, A34E, A34D, A34I, A34L, A34M, A34V, A34F, A34W, A34Y, R36D, R36E, T37C, T37D, T37E, K38C, K38E, K38T, K38D, K38L, K38G, K38A, K38S, K38N, K38H, L39E, L39Q, L39H, W41N, W41C, W41E, W41D, I42R, I42N, I42S, I42A, I42Q, I42N, 142S, I42A, I42Q, I42K, S43Q, S43N, Y44K, Y44C, Y44D, Y44E, S45C, S45D, S45E, D46C, A51N, S53N, G58N, G59S, G59T, K62E, K62R, K62D, K62N, K62Q, K62T, L65Q, L65S, L65N, F71D, F71Y, F71E, F71Q, F71N, P74S, P74A, A75E, A75D, E77A, E82Q, E82N, E82S, E82T T83K, N95S, N95T, G97S, G97T, Y101N, D104N, T106N, K109N, E116D, G117N, G124N, S126N, T128N, L141C, L141D, L141E, E142D, E142C, K143C, K143D, K143E, R144E, R144C, R144D, N145Y, N145G, N145F, N145M, N145S, N145I, N145L, N145T, N145V, N145P, N145K, N145H, N145Q, N145E, N145R, N145W, N145D, N145C, K157V, K157L, K157I, K157M, K157F, K157W, K157P, K157G, K157S, K157T, K157C, K157Y, K157N, K157E, K157R, K157H, K157D, K157Q, V158L, V158I, V158M, V158F, V158W, V158P, V158G, V158S, V158T, V158C, V158Y, V158N, V158E, V158R, V158K, V158H, V158D, V158Q, A175S, A175T, G179N, I186S, I186T, V188N, R202S, R202T, I205S, I205T, D212N, E220N, I230N, P231N, P236N, G237N, Q250C, V253N, E265N, T267N, E270N, A274M, A274L, A274K, A274R, A274D, A274V, A274I, A274F, A274W, A274P, A274G, A274T, A274C, A274Y, A274N, A274E, A274H, A274S, A274Q, F275H, R277N, F278S, F278A, F278N, F278Q, F278G, L280N, L288K, L288C, L288D, D289C, D289K, L288E, R290C, R290G, R290A, R290S, R290T, R290K, R290D, R290E, G291E, G291D, G291C, G291N, G291K, A292C, A292K, A292D, A292E, T293K, E296V, E296L, E296I, E296M, E296F, E296W, E296P, E296G, E296S, E296T, E296C, E296Y, E296N, E296K, E296R, E296H, E296D, E296Q, M298Q, M298V, M298L, M298I, M298F, M298W, M298P, M298G, M298S, M298T, M298C, M298Y, M298N, M298K, M298R, M298H, M298E, M298D, P303S, P303ST, R304Y, R304F, R304L, R304M, R304G, R304T, R304A, R304S, R304N, L305V, L305Y, L305I, L305F, L305A, L305M, L305W, L305P, L305G, L305S, L305T, L305C, L305N, L305E, L305K, L305R, L305H, L305D, L305Q, M306D, M306N, D309S, D309T, Q312N, Q313K, Q313D, Q313E, S314A, S314V, S314I, S314M, S314F, S314W, S314P, S314G, S314L, S314T, S314C, S314Y, S314N, S314E, S314K, S314R, S314H, S314D, S314Q, R315K, R315G, R315A, R315S, R315T, R315Q, R315C, R315D, R315E, K316D, K316C, K316E, V317C, V317K, V317D, V317E, G318N, N322Y, N322G, N322F, N322M, N322S, N322I, N322L, N322T, N322V, N322P, N322K, N322H, N322Q, N322E, N322R, N322W, N322C, G331N, Y332S, Y332A, Y332N, Y332Q, Y332G, D334G, D334E, D334A, D334V, D334I, D334M, D334F, D334W, D334P, D334L, D334T, D334C, D334Y, D334N, D334K, D334R, D334H, D334S, D334Q, S336G, S336E, S336A, S336V, S336I, S336M, S336F, S336W, S336P, S336L, S336T, S336C, S336Y, S336N, S336K, S336R, S336H, S336D, S336Q, K337L, K337V, K337I, K337M, K337F, K337W, K337P, K337G, K337S, K337T, K337C, K337Y, K337N, K337E, K337R, K337H, K337D, K337Q, K341E, K341Q, K341G, K341T, K341A, K341S, G342N, H348N, R353N, Y357N, I361N, F374P, F374A, F374V, F374I, F374L, F374M, F374W, F374G, F374S, F374T, F374C, F374Y, F374N, F374E, F374K, F374R, F374H, F374D, F374Q, V376N, R379N, L390C, L390K, L390D, L390E, M391D, M391C, M391K, M391N, M391E, R392C, R392D, R392E, S393D, S393C, S393K, S393E, E394K, P395K, E394C, P395D, P395C, P395E, R396K, R396C, R396D, R396E, P397D, P397K, P397C, P397E, G398K, G398C, G398D, G398E, V399C, V399D, V399K, V399E, L400K, L401K, L401C, L401D, L401E, R402D, R402C, R402K, R402E, A403K, A403C, A403D, A403E, P404E, P404D, P404C, P404K, F405K, P406C, K32N/A34S, K32N/A34T, F31N/D33S, F31N/D33T, 130N/K32S, 130N/K32T, A34N/R36S, A34N/R36T, K38N/F40S, K38N/F40T, T37N/L39S, T37N/L39T, R36N/K38S, R36N/K38T, L39N/W41S, L39N/W41T, F40N/142S, F40N/142T, I42N/Y44S, I42N/Y44T, Y44N/D46S, Y44N/D46T, D46N/D48S, D46N/D48T, G47N/Q49S, G47N/Q49T, K143N/N145S, K143N/N145T, E142N/R144S, E142N/R144T, L141N/K143S, L141N/K143T, I140N/E142S/, I140N/E142T, R144N/A146S, R144N/A146T, A146N/K148S, A146N/K148T, S147N/P149S/, S147N/P149T, R290N/A292S, R290N/A292T, D289N/G291S, D289N/G291T, L288N/R290S, L288N/R290T, L287N/D289S, L287N/D289, A292N/A294S, A292N/A294T, T293N/L295S, T293N/L295T, R315N/V317S, R315N/V317T, S314N/K316S, S314N/K316T, Q313N/R315S, Q313N/R315T, K316N/G318S, K316N/G318T, V317N/D319S, V317N/D319T, K341N/D343S, K341N/D343T, S339N/K341S, S339N/K341T, D343N/G345S, D343N/G345T, R392N/E394S, R392N/E394T, L390N/R392S, L390N/R392T, K389N/M391S, K389N/M391T, S393N/P395S, S393N/P395T, E394N/R396S, E394N/R396T, P395N/P397S, P395N/P397T, R396N/G398S, R396N/G398T, P397N/V399S, P397N/V399T, G398N/L400S, G398N/L400T, V399N/L401S, V399N/L401T, L400N/R402S, L400N/R402T, L401N/A403S, L401N/A403T, R402N/P404S, R402N/P404T, A403N/F405S, A403N/F405T, P404N/P406S and P404N/P406T.

84. The modified FVII polypeptide of claim 42, comprising one or more further amino acid modification(s) selected from among S278C/V302C, L279C/N301C, V280C/V301C, S281C/V299C, insertion of a tyrosine at position 4, F4S, F4T, P10Q, P10E, P10D, P10N, Q21N, R28F, R28E, I30C, I30D, I30E, K32D, K32Q, K32E, K32G, K32H, K32T, K32C, K32A, K32S, D33C, D33F, D33E, D33K, A34C, A34E, A34D, A34I, A34L, A34M, A34V, A34F, A34W, A34Y, R36D, R36E, T37C, T37D, T37E, K38C, K38E, K38T, K38D, K38L, K38G, K38A, K38S, K38N, K38H, L39E, L39Q, L39H, W41N, W41C, W41E, W41D, I42R, I42N, I42S, I42A, I42Q, I42N, 142S, I42A, I42Q, I42K, S43Q, S43N, Y44K, Y44C, Y44D, Y44E, S45C, S45D, S45E, D46C, A51N, S53N, G58N, G59S, G59T, K62E, K62R, K62D, K62N, K62Q, K62T, L65Q, L65S, L65N, F71D, F71Y, F71E, F71Q, F71N, P74S, P74A, A75E, A75D, E77A, E82Q, E82N, E82S, E82T T83K, N95S, N95T, G97S, G97T, Y101N, D104N, T106N, K109N, E116D, G117N, G124N, S126N, T128N, L141C, L141D, L141E, E142D, E142C, K143C, K143D, K143E, R144E, R144C, R144D, N145Y, N145G, N145F, N145M, N145S, N145I, N145L, N145T, N145V, N145P, N145K, N145H, N145Q, N145E, N145R, N145W, N145D, N145C, K157V, K157L, K157I, K157M, K157F, K157W, K157P, K157G, K157S, K157T, K157C, K157Y, K157N, K157E, K157R, K157H, K157D, K157Q, V158L, V158I, V158M, V158F, V158W, V158P, V158G, V158S, V158T, V158C, V158Y, V158N, V158E, V158R, V158K, V158H, V158D, V158Q, A175S, A175T, G179N, I186S, I186T, V188N, R202S, R202T, I205S, I205T, D212N, E220N, I230N, P231N, P236N, G237N, Q250C, V253N, E265N, T267N, E270N, A274M, A274L, A274K, A274R, A274D, A274V, A274I, A274F, A274W, A274P, A274G, A274T, A274C, A274Y, A274N, A274E, A274H, A274S, A274Q, F275H, R277N, F278S, F278A, F278N, F278Q, F278G, L280N, L288K, L288C, L288D, D289C, D289K, L288E, R290C, R290G, R290A, R290S, R290T, R290K, R290D, R290E, G291E, G291D, G291C, G291N, G291K, A292C, A292K, A292D, A292E, T293K, E296V, E296L, E296I, E296M, E296F, E296W, E296P, E296G, E296S, E296T, E296C, E296Y, E296N, E296K, E296R, E296H, E296D, E296Q, M298Q, M298V, M298L, M298I, M298F, M298W, M298P, M298G, M298S, M298T, M298C, M298Y, M298N, M298K, M298R, M298H, M298E, M298D, P303S, P303ST, R304Y, R304F, R304L, R304M, R304G, R304T, R304A, R304S, R304N, L305V, L305Y, L305I, L305F, L305A, L305M, L305W, L305P, L305G, L305S, L305T, L305C, L305N, L305E, L305K, L305R, L305H, L305D, L305Q, M306D, M306N, D309S, D309T, Q312N, Q313K, Q313D, Q313E, S314A, S314V, S314I, S314M, S314F, S314W, S314P, S314G, S314L, S314T, S314C, S314Y, S314N, S314E, S314K, S314R, S314H, S314D, S314Q, R315K, R315G, R315A, R315S, R315T, R315Q, R315C, R315D, R315E, K316D, K316C, K316E, V317C, V317K, V317D, V317E, G318N, N322Y, N322G, N322F, N322M, N322S, N322I, N322L, N322T, N322V, N322P, N322K, N322H, N322Q, N322E, N322R, N322W, N322C, G331N, Y332S, Y332A, Y332N, Y332Q, Y332G, D334G, D334E, D334A, D334V, D334I, D334M, D334F, D334W, D334P, D334L, D334T, D334C, D334Y, D334N, D334K, D334R, D334H, D334S, D334Q, S336G, S336E, S336A, S336V, S336I, S336M, S336F, S336W, S336P, S336L, S336T, S336C, S336Y, S336N, S336K, S336R, S336H, S336D, S336Q, K337L, K337V, K337I, K337M, K337F, K337W, K337P, K337G, K337S, K337T, K337C, K337Y, K337N, K337E, K337R, K337H, K337D, K337Q, K341E, K341Q, K341G, K341T, K341A, K341S, G342N, H348N, R353N, Y357N, 1361N, F374P, F374A, F374V, F374I, F374L, F374M, F374W, F374G, F374S, F374T, F374C, F374Y, F374N, F374E, F374K, F374R, F374H, F374D, F374Q, V376N, R379N, L390C, L390K, L390D, L390E, M391D, M391C, M391K, M391N, M391E, R392C, R392D, R392E, S393D, S393C, S393K, S393E, E394K, P395K, E394C, P395D, P395C, P395E, R396K, R396C, R396D, R396E, P397D, P397K, P397C, P397E, G398K, G398C, G398D, G398E, V399C, V399D, V399K, V399E, L400K, L401K, L401C, L401D, L401E, R402D, R402C, R402K, R402E, A403K, A403C, A403D, A403E, P404E, P404D, P404C, P404K, F405K, P406C, K32N/A34S, K32N/A34T, F31N/D33S, F31N/D33T, 130N/K32S, 130N/K32T, A34N/R36S, A34N/R36T, K38N/F40S, K38N/F40T, T37N/L39S, T37N/L39T, R36N/K38S, R36N/K38T, L39N/W41S, L39N/W41T, F40N/142S, F40N/142T, I42N/Y44S, I42N/Y44T, Y44N/D46S, Y44N/D46T, D46N/D48S, D46N/D48T, G47N/Q49S, G47N/Q49T, K143N/N145S, K143N/N145T, E142N/R144S, E142N/R144T, L141N/K143S, L141N/K143T, I140N/E142S/, I140N/E142T, R144N/A146S, R144N/A146T, A146N/K148S, A146N/K148T, S147N/P149S/, S147N/P149T, R290N/A292S, R290N/A292T, D289N/G291S, D289N/G291T, L288N/R290S, L288N/R290T, L287N/D289S, L287N/D289, A292N/A294S, A292N/A294T, T293N/L295S, T293N/L295T, R315N/V317S, R315N/V317T, S314N/K316S, S314N/K316T, Q313N/R315S, Q313N/R315T, K316N/G318S, K316N/G318T, V317N/D319S, V317N/D319T, K341N/D343S, K341N/D343T, S339N/K341S, S339N/K341T, D343N/G345S, D343N/G345T, R392N/E394S, R392N/E394T, L390N/R392S, L390N/R392T, K389N/M391S, K389N/M391T, S393N/P395S, S393N/P395T, E394N/R396S, E394N/R396T, P395N/P397S, P395N/P397T, R396N/G398S, R396N/G398T, P397N/V399S, P397N/V399T, G398N/L400S, G398N/L400T, V399N/L401S, V399N/L401T, L400N/R402S, L400N/R402T, L401N/A403S, L401N/A403T, R402N/P404S, R402N/P404T, A403N/F405S, A403N/F405T, P404N/P406S and P404N/P406T.

85. The modified FVII polypeptide of claim 1, comprising substitution of positions 300-322, 305-322, 300-312, or 305-312 with the corresponding amino acids from trypsin, thrombin or FX, or substitution of positions 310-329, 311-322 or 233-329 with the corresponding amino acids from trypsin.

86. The modified FVII polypeptide of claim 23, comprising substitution of positions 300-322, 305-322, 300-312, or 305-312 with the corresponding amino acids from trypsin, thrombin or FX, or substitution of positions 310-329, 311-322 or 233-329 with the corresponding amino acids from trypsin.

87. The modified FVII polypeptide of claim 42, comprising substitution of positions 300-322, 305-322, 300-312, or 305-312 with the corresponding amino acids from trypsin, thrombin or FX, or substitution of positions 310-329, 311-322 or 233-329 with the corresponding amino acids from trypsin.

88. The modified FVII polypeptide of claim 1, wherein the unmodified FVII polypeptide has a sequence of amino acids set forth in SEQ ID NO:3.

89. The modified FVII polypeptide of claim 23, wherein the unmodified FVII polypeptide has a sequence of amino acids set forth in SEQ ID NO:3.

90. The modified FVII polypeptide of claim 42, wherein the unmodified FVII polypeptide has a sequence of amino acids set forth in SEQ ID NO:3.

91. The modified FVII polypeptide, comprising a sequence of amino acids residues whose sequence is forth in any of SEQ ID NOS: 18-43 and 125-146 and 206-250.

92. A modified FVII polypeptide that is an allelic or species variant thereof or that has at least 80%, 85%, 90%, 91%, 92%, 93%, 94%, 95%, 96%, 97%, 98%, 99% or more sequence identity with a polypeptide of claim 91.

93. A modified FVII polypeptide of claim 1, wherein the polypeptide:
is a single-chain polypeptide or is a two-chain or multiple-chain polypeptide; and/or
is active or activated.

94. A modified FVII polypeptide of claim 23, wherein the polypeptide:
is a single-chain polypeptide or is a two-chain or multiple-chain polypeptide; and/or
is active or activated.

95. A modified FVII polypeptide of claim 42, wherein the polypeptide:
is a single-chain polypeptide or is a two-chain or multiple-chain polypeptide; and/or
is active or activated.

96. A modified FVII polypeptide of claim 62, wherein the polypeptide:
is a single-chain polypeptide or is a two-chain or multiple-chain polypeptide; and/or
is active or activated.

97. The modified polypeptide of claim 1, wherein the coagulation activity is increased compared to the absence of the modification.

98. The modified polypeptide of claim 23, wherein the coagulation activity is increased compared to the absence of the modification.

99. The modified polypeptide of claim 42, wherein the coagulation activity is increased compared to the absence of the modification.

100. The modified polypeptide of claim 62, wherein the coagulation activity is increased compared to the absence of the modification.
